(19) United States
(12) Patent Application Publication
(10) Pub. No.: US 2023/0392156 A1
(43) Pub. Date: Dec. 7, 2023

(54) G PROTEIN-COUPLED RECEPTOR 75 (GPR75) IRNA COMPOSITIONS AND METHODS OF USE THEREOF

(71) Applicants: Alnylam Pharmaceuticals, Inc., Cambridge, MA (US); Regeneron Pharmaceuticals, Inc., Tarrytown, NY (US)

(72) Inventors: James D. McIninch, Burlington, MA (US); Bret Lee Bostwick, Cambridge, MA (US); Adam Castoreno, Framingham, MA (US)

(73) Assignees: Alnylam Pharmaceuticals, Inc., Cambridge, MA (US); Regeneron Pharmaceuticals, Inc., Tarrytown, NY (US)

(21) Appl. No.: 18/129,923

(22) Filed: Apr. 3, 2023

Related U.S. Application Data
(63) Continuation of application No. PCT/US2021/053332, filed on Oct. 4, 2021.
(60) Provisional application No. 63/216,629, filed on Jun. 30, 2021.
(60) Provisional application No. 63/087,342, filed on Oct. 5, 2020.

(51) Int. Cl. C12N 15/113; A61P 3/04

(52) U.S. Cl. CPC C12N 15/1138; A61P 3/04; C12N 2310/315; C12N 2310/3515; C12N 2310/14

(57) ABSTRACT

The present invention relates to RNAi agents, e.g., dsRNA agents, targeting the G-protein coupled receptor 75 (GPR75) gene. The invention also relates to methods of using such RNAi agents to inhibit expression of a GPR75 gene and to methods of treating or preventing a GPR75-associated disease, such as a body weight disorder, e.g., obesity, in a subject.

### RELATED APPLICATIONS

[0001] This application is a 35 § U.S.C. 111(a) continuation application which claims the benefit of priority to PCT/US2021/053332, filed on Oct. 4, 2021, which, in turn, claims the benefit of priority to U.S. Provisional Application No. 63/087,342, filed on Oct. 5, 2020, and U.S. Provisional Application No. 63/216,629, filed on Jun. 30, 2021. The entire contents of each of the foregoing applications are incorporated herein by reference.

### SEQUENCE LISTING

[0002] The instant application contains a Sequence Listing which has been submitted electronically in XML file format and is hereby incorporated by reference in its entirety. Said XML copy, created on Jul. 25, 2023, is named 121301_13603_SL.xml and is 16,289,458 bytes in size.

### BACKGROUND OF THE INVENTION

[0003] G protein-coupled receptor 75 (GPR75) is a member of the G protein-coupled receptor family. It contains most of the characteristic features of GPCRs, namely seven transmembrane spanning domains, N-glycosylation sites in the N-terminus, and numerous serine and threonine phosphorylation sites in the C-terminus. Amino acid sequence analysis has shown that GPR75 is most closely related to a putative Caenorhabditis elegans neuropeptide Y receptor (24% homology), the rat galanin receptor type 3 (25% homology) and the porcine growth hormone secretagogue receptor type 1b (25% homology) (Tarttelin et al. (1999) Biochem Biophys Res Commun. 260:174-180). GPR75 is classified as a Gq-coupled Class-A orphan receptor whose activation is associated with an increase in intracellular calcium and IP-1 accumulation. GPR75 is expressed in many tissues and, in the brain, is expressed in the neocortex, entorhinal cortex, hippocampus, thalamus and hypothalamus.

[0004] The cytochrome P450-derived eicosanoid 20-Hydroxyeicosatetraenoic acid (20-HETE) has been shown to bind to and activate the GPR75 receptor. 20-HETE is the omega-hydroxylated metabolite of arachidonic acid produced by the Cytochrome P450 (CYP) 4A and 4F family of enzymes. Clinical studies have demonstrated that the urinary and/or plasma levels of 20-HETE are elevated in obese and diabetic individuals and that 20-HETE stimulates adipogenesis, contributes to pathogenesis of diabetes, induces hyperglycemia and impedes the cellular actions of insulin. In addition, mice overexpressing the Cyp4a12-20-HETE synthase, when fed a high fat diet, rapidly develop obesity, hyperglycemia, hyperinsulinemia and impairment of glucose tolerance. These animals also developed insulin resistance in skeletal muscle, liver and adipose tissue, evident by impaired tyrosine phosphorylation of the insulin receptor and the insulin receptor substrate. Furthermore, 20-HETE has been demonstrated to interfere with insulin signaling in a GPR75-dependent manner (Gilani, et al. (2019) FASEB J. 33 (S1): 514.8; Gilani, et al. (2018) Am J Physiol Regul Integr Comp Physiol 315: R934-R944).

[0005] Body weight disorders, e.g., obesity, are a growing health problem in many countries. Body weight disorders, such as obesity increase the risk of health problems such as insulin resistance, type 2 diabetes, heart diseases, osteoarthritis, sleep apnea, and some forms of cancer. Reducing excessive body weight can significantly reduce the risk of these health problems. The primary treatment for body weight disorders, such as obesity, is dieting and physical exercise followed by weight-loss medication and surgery. There are a few FDA-approved weight-loss drugs on market, such as Orlistat (Alli®) and Sibutramine (Meridia®), however, neither has achieved the weight-loss goals set by the FDA. In addition, several weight-loss drug candidates, also known as appetite suppressants, have been either suspended or canceled at various stages of development due to their severe side effects. Furthermore, although there are many methods to reduce initial body weight, long-term maintenance of that lost weight is difficult. Many people who successfully achieve initial weight lost regain the weight subsequently. In addition, morbidly obese patients may need medications for a long-term maintenance of healthy body weight after a successful weight-loss surgery. However, there is currently no weight-loss maintenance drug on the market.

[0006] Accordingly, there exists an unmet need for effective treatments for obesity, such as an agent that can selectively and efficiently silence the GPR75 gene using the cell's own RNAi machinery that has both high biological activity and in vivo stability, and that can effectively inhibit expression of a target GPR75 gene.

### BRIEF SUMMARY OF THE INVENTION

[0007] The present disclosure provides RNAi agent compositions which effect the RNA-induced silencing complex (RISC)-mediated cleavage of RNA transcripts of a gene encoding G protein-coupled receptor 75 (GPR75). The GPR75 gene may be within a cell, e.g., a cell within a subject, such as a human. The present disclosure also provides methods of using the RNAi agent compositions of the disclosure for inhibiting the expression of a GPR75 gene or for treating a subject who would benefit from inhibiting or reducing the expression of a GPR75 gene, e.g., a subject having a GPR75-associated disorder, e.g., a subject having a body weight disorder, e.g., obesity, or a subject at risk of developing a body weight disorder.

[0008] Accordingly, in one aspect, the instant disclosure provides a double stranded ribonucleic acid (dsRNA) agent for inhibiting expression of a G protein-coupled receptor 75 (GPR75) gene, wherein the dsRNA agent comprises a sense strand and an antisense strand forming a double stranded region, wherein the sense strand comprises a nucleotide sequence comprising at least 15 contiguous nucleotides, with 0, 1, 2, or 3 mismatches, of a portion of the nucleotide sequence of any one of SEQ ID NOs:1-4 or a nucleotide sequence having at least 90% nucleotide sequence identity to a portion of the nucleotide sequence of any one of SEQ ID NOs:1-4, and the antisense strand comprises a nucleotide sequence comprising at least 15 contiguous nucleotides, with 0, 1, 2, or 3 mismatches, of the corresponding portion of the nucleotide sequence of any one of SEQ ID NOs:5-8, or a nucleotide sequence having at least 90% nucleotide sequence identity to a portion of the nucleotide sequence of any one of SEQ ID NOs:5-8 and wherein the sense strand or the antisense strand is conjugated to one or more lipophilic moieties.

[0009] In one aspect, the present invention provides a double stranded ribonucleic acid (dsRNA) agent for inhibiting expression of a GPR75 gene in a cell, comprising a sense strand and an antisense strand forming a double stranded region, wherein the antisense strand comprises a region complementary to part of an mRNA encoding a GPR75 gene (any one of SEQ ID NOs:1-4), wherein each strand independently is 14 to 30 nucleotides in length; and wherein the sense strand or the antisense strand is conjugated to one or more lipophilic moieties.

[0010] In yet another aspect, the present invention provides a double stranded RNAi agent for inhibiting expression of a GPR75 gene in a cell, comprising a sense strand and an antisense strand forming a double stranded region, wherein the antisense strand comprises at least 15 contiguous nucleotides differing by no more than 3 nucleotides from any one of the antisense nucleotide sequences in any one of Tables 2, 3, 5, and 6, wherein each strand independently is 14 to 30 nucleotides in length; and wherein the sense strand or the antisense strand is conjugated to one or more lipophilic moieties.

[0011] In one embodiment, the sense strand or the antisense strand is a sense strand or an antisense strand selected from the group consisting of any of the sense strands and antisense strands in any one of Tables 2, 3, 5, and 6.

[0012] In another aspect, the present invention provides a double stranded RNAi agent for inhibiting expression of a G Protein-Coupled Receptor 75 (GPR75) gene in a cell, comprising a sense strand and an antisense strand forming a double stranded region, wherein the sense strand comprises at least 15 contiguous nucleotides differing by no more than 3 nucleotides from any one of the nucleotide sequences of nucleotides 38-60; 50-72; 148-181; 153-181; 153-175; 159-181; 228-250; 240-262; 341-363; 341-368; 346-368; 369-396; 369-391; 374-396; 388-410; 414-436; 424-461; 424-446; 424-451; 434-456; 439-461; 429-451; 457-504; 462-504; 462-491; 482-504; 469-491; 457-479; 462-584; 475-497; 469-491; 509-537; 509-531; 515-537; 544-576; 544-566; 549-571; 580-607; 580-602; 585-607; 595-617; 615-647; 615-637; 620-642; 620-647; 625-647; 773-806; 773-795; 773-795; 778-800; 784-806; 837-872; 837-859; 843-872; 843-865; 850-872; 860-882; 889-911; 900-936; 900-922; 908-936; 908-930; 914-936; 938-990; 938-960; 943-965; 968-990; 1060-1101; 1060-1082; 1066-1088; 1073-1095; 1079-1101; 1097-1119; 1238-1260; 1268-1290; 1284-1393; 1284-1306; 1292-1393; 1292-1314; 1292-1383; 1292-1314; 1301-1323; 1307-1383; 1307-1342; 1307-1329; 1313-1335; 1371-1393; 1351-1373; 1320-1342; 1336-1358; 1345-1367; 1351-1373; 1361-1383; 1366-1388; 1393-1415; 1422-1463; 1422-1444; 1441-1463; 1487-1526; 1487-1509; 1493-1526; 1493-1515; 1498-1520; 1504-1526; 1515-1571; 1515-1557; 1515-1543; 1515-1537; 1521-1543; 1530-1552; 1535-1557; 1540-1562; 1549-1571; 1559-1586; 1559-1581; 1564-1586; 1583-1629; 1583-1605; 1588-1610; 1595-1617; 1600-1629; 1600-1622; 1607-1629; 1624-1646; 1635-1657; 1672-1721; 1672-1710; 1677-1699; 1699-1721; 1672-1699; 1688-1710; 1672-1694; 1683-1705; 1693-1714; 1732-1754; 1744-1798; 1751-1773; 1758-1780; 1767-1789; 1776-1798; 1790-1818; 1790-1812; 1796-1818; 1808-1856; 1808-1848; 1808-1836; 1808-1830; 1826-1848; 1814-1836; 1819-1841; 1834-1856; 1877-2082; 1877-1899; 1882-2082; 1882-1925; 1882-1963; 1882-1904; 1887-1693; 1887-1909; 1898-1920; 1903-1925; 1908-1930; 1913-1935; 1913-1950; 1921-1950; 1921-1943; 1928-1950; 1933-1955; 1941-1963; 1946-1968; 1953-1985; 1953-2082; 1953-1975; 1938-1985; 1958-1980; 1963-1985; 1968-1990; 1974-1996; 1974-2065; 1974-2082; 1974-2002; 1980-2002; 1985-2007; 1990-2012; 1990-2033; 1999-2021; 2005-2033; 2005-2027; 2011-2033; 2017-2039; 2025-2055; 2025-2047; 2033-2055; 2038-2060; 2043-2065; 2033-2055; 2048-2070; 2054-2082; 2054-2076; and 2060-2082 of SEQ ID NO: 1, wherein the antisense strand comprises at least 15 contiguous nucleotides from the corresponding nucleotide sequence of SEQ ID NO: 2; and wherein the sense strand or the antisense strand is conjugated to one or more lipophilic moieties.

[0013] In one embodiment, both the sense strand and the antisense strand is conjugated to one or more lipophilic moieties.

[0014] In one embodiment, lipophilicity of the lipophilic moiety, measured by logKow, exceeds 0.

[0015] In one embodiment, the hydrophobicity of the double-stranded RNAi agent, measured by the unbound fraction in a plasma protein binding assay of the double-stranded RNAi agent, exceeds 0.2.

[0016] In one embodiment, the plasma protein binding assay is an electrophoretic mobility shift assay using human serum albumin protein.

[0017] In one embodiment, the dsRNA agent comprises at least one modified nucleotide.

[0018] In some embodiments, substantially all of the nucleotides of the antisense strand are modified nucleotides.

[0019] In another embodiment, all of the nucleotides of the sense strand and all of the nucleotides of the antisense strand comprise a modification.

[0020] In one embodiment, at least one of the modified nucleotides is selected from the group a deoxy-nucleotide, a 3′-terminal deoxythimidine (dT) nucleotide, a 2′-O-methyl modified nucleotide, a 2′-fluoro modified nucleotide, a 2′-deoxy-modified nucleotide, a locked nucleotide, an unlocked nucleotide, a conformationally restricted nucleotide, a constrained ethyl nucleotide, an abasic nucleotide, a 2′-amino-modified nucleotide, a 2′-O-allyl-modified nucleotide, 2′-C-alkyl-modified nucleotide, a 2′-hydroxyl-modified nucleotide, a 2′-methoxyethyl modified nucleotide, a 2′-O-alkyl-modified nucleotide, a morpholino nucleotide, a phosphoramidate, a non-natural base comprising nucleotide, a tetrahydropyran modified nucleotide, a 1,5-anhydrohexitol modified nucleotide, a cyclohexenyl modified nucleotide, a nucleotide comprising a 5′-phosphorothioate group, a nucleotide comprising a 5′-methylphosphonate group, a nucleotide comprising a 5′ phosphate or 5′ phosphate mimic, a nucleotide comprising vinyl phosphonate, a nucleotide comprising adenosine-glycol nucleic acid (GNA), a nucleotide comprising thymidine-glycol nucleic acid (GNA)S-Isomer, a nucleotide comprising 2-hydroxymethyl-tetrahydrofurane-5-phosphate, a nucleotide comprising 2′-deoxythymidine-3′ phosphate, a nucleotide comprising 2′-deoxyguanosine-3′-phosphate, a 2′-O hexadecyl nucleotide, a nucleotide comprising a 2′-phosphate, a cytidine-2′-phosphate nucleotide, a guanosine-2′-phosphate nucleotide, a 2′-O-hexadecyl-cytidine-3′-phosphate nucleotide, a 2′-O-hexadecyl-adenosine-3′-phosphate nucleotide, a 2′-O-hexadecyl-guanosine-3′-phosphate nucleotide, a 2′-O-hexadecyl-uridine-3′-phosphate nucleotide, a 5′-vinyl phosphonate (VP), a 2′-deoxyadenosine-3′-phosphate nucleotide, a 2′-deoxycytidine-3′-phosphate nucleotide, a 2′-deoxyguanosine-3′-phosphate nucleotide, a 2′-deoxythymidine-3′-phosphate nucleotide, a 2′-deoxyuridine nucleotide, and a terminal nucleotide linked to a cholesteryl derivative and a dodecanoic acid bisdecylamide group; and combinations thereof.

[0021] In another embodiment, modified nucleotide is selected from the group consisting of a 2′-deoxy-2′-fluoro modified nucleotide, a 2′-deoxy-modified nucleotide, 3′-terminal deoxythimidine nucleotides (dT), a locked nucleotide, an abasic nucleotide, a 2′-amino-modified nucleotide, a 2′-alkyl-modified nucleotide, a 2′-O-methyl modified nucleotide, a nucleotide comprising glycol nucleic acid (GNA), a morpholino nucleotide, a phosphoramidate, and a non-natural base comprising nucleotide.

[0022] In another embodiment, the modified nucleotide comprises a short sequence of 3′-terminal deoxythimidine nucleotides (dT).

[0023] In yet another embodiment, the modifications on the nucleotides are 2′-O-methyl modifications, 2′-deoxy-modifications, 2′fluoro modifications, 5′-vinyl phosphonate (VP) modification, and 2′-0 hexadecyl nucleotide modifications.

[0024] In certain embodiments, the double stranded RNAi agent does not include an inverted abasic nucleotide.

[0025] In one embodiment, the dsRNA agent further comprises at least one phosphorothioate internucleotide linkage.

[0026] In one embodiment, the dsRNA agent comprises 6-8 phosphorothioate internucleotide linkages.

[0027] In one embodiment, each strand is no more than 30 nucleotides in length.

[0028] In one embodiment, at least one strand comprises a 3′ overhang of at least 1 nucleotide.

[0029] In another embodiment, at least one strand comprises a 3′ overhang of at least 2 nucleotides.

[0030] The double stranded region may be 15-30 nucleotide pairs in length; 17-23 nucleotide pairs in length; 17-25 nucleotide pairs in length; 23-27 nucleotide pairs in length; 19-21 nucleotide pairs in length; or 21-23 nucleotide pairs in length.

[0031] Each strand of the dsRNA agent may be 15-30, 17-20, 19-30 nucleotides in length; 19-23 nucleotides in length; or 21-23 nucleotides in length, e.g., 15, 16, 17, 18, 19, 20, 21, 22, 23, 24, 25, 26, 27, 28, 29, or 30 nucleotides in length.

[0032] In certain embodiments, the double stranded RNAi agent further includes a lipophilic ligand, e.g., a C16 ligand, conjugated to the 3′ end of the sense strand through a monovalent or branched bivalent or trivalent linker.

[0033] In one embodiment, the ligand is conjugated at the 2′-position of a nucleotide or modified nucleotide within the sense or antisense strand. For example, a C16 ligand may be conjugated as shown in the following structure:

[chemical structure]

where * denotes a bond to an adjacent nucleotide, and B is a nucleobase or a nucleobase analog, optionally where B is adenine, guanine, cytosine, thymine or uracil.

[0034] In other embodiments, the agent further comprises a targeting ligand that targets a liver tissue, e.g., one or more GalNAc derivatives, conjugated to the double stranded RNAi agent via a linker or carrier.

[0035] In yet other embodiments, the agents further comprise a lipophilic ligand, e.g., a C16 ligand, conjugated to the 3′ end of the sense strand through a monovalent or branched bivalent or trivalent linker and a targeting ligand that targets a liver tissue, e.g., one or more GalNAc derivatives conjugated to the 3′ end of the sense strand through a monovalent or branched bivalent or trivalent linker.

[0036] In one embodiment, one or more lipophilic moieties are conjugated to one or more internal positions on at least one strand.

[0037] In one embodiment, the one or more lipophilic moieties are conjugated to one or more internal positions on at least one strand via a linker or carrier.

[0038] In certain embodiments, the lipophilic moiety is not a cholesterol moiety.

[0039] In certain embodiments, the agent further comprises a targeting ligand that targets a liver tissue, e.g., one or more GalNAc derivatives, optionally conjugated to the double stranded RNAi agent via a linker or carrier.

[0040] In yet other embodiments, the agents further comprise one or more lipophilic moieties conjugated to one or more internal nucleotide positions, optionally via a linker or carrier and a targeting ligand that targets a liver tissue, e.g., one or more GalNAc derivatives, optionally conjugated to the double stranded RNAi agent via a linker or carrier.

[0041] In one embodiment, the internal positions include all positions except the terminal two positions from each end of the at least one strand.

[0042] In another embodiment, the internal positions include all positions except the terminal three positions from each end of the at least one strand.

[0043] In another embodiment, the internal positions exclude a cleavage site region of the sense strand.

[0044] In yet another embodiment, the internal positions include all positions except positions 9-12, counting from the 5′-end of the sense strand. In certain embodiments, the sense strand is 21 nucleotides in length.

[0045] In one embodiment, the internal positions include all positions except positions 11-13, counting from the 3′-end of the sense strand. Optionally, the internal positions exclude the cleavage site region of the antisense strand. In certain embodiments, the sense strand is 21 nucleotides in length.

[0046] In one embodiment, the internal positions exclude a cleavage site region of the antisense strand.

[0047] In one embodiment, the internal positions include all positions except positions 12-14, counting from the 5′-end of the antisense strand. In certain embodiments, the antisense strand is 23 nucleotides in length.

[0048] In one embodiment, the internal positions include all positions except positions 11-13 on the sense strand, counting from the 3′-end, and positions 12-14 on the antisense strand, counting from the 5′-end. In certain embodiments, the sense strand is 21 nucleotides in length and the antisense strand is 23 nucleotides in length.

[0049] In one embodiment, the one or more lipophilic moieties are conjugated to one or more of the internal positions selected from the group consisting of positions 4-8 and 13-18 on the sense strand, and positions 6-10 and 15-18 on the antisense strand, counting from the 5′ end of each strand.

[0050] In one embodiment, the one or more lipophilic moieties are conjugated to one or more of the internal positions selected from the group consisting of positions 5, 6, 7, 15, and 17 on the sense strand, and positions 15 and 17 on the antisense strand, counting from the 5′-end of each strand. In certain embodiments, the sense strand is 21 nucleotides in length and the antisense strand is 23 nucleotides in length.

[0051] In one embodiment, the positions in the double stranded region exclude a cleavage site region of the sense strand.

[0052] In one embodiment, the sense strand is 21 nucleotides in length, the antisense strand is 23 nucleotides in length, and the lipophilic moiety is conjugated to position 21, position 20, position 15, position 1, position 7, position 6, or position 2 of the sense strand or position 16 of the antisense strand.

[0053] In one embodiment, the lipophilic moiety is conjugated to position 21, position 20, position 15, position 1, or position 7 of the sense strand.

[0054] In one embodiment, the lipophilic moiety is conjugated to position 21, position 20, or position 15 of the sense strand.

[0055] In one embodiment, the lipophilic moiety is conjugated to position 20 or position 15 of the sense strand.

[0056] In one embodiment, the lipophilic moiety is conjugated to position 16 of the antisense strand.

[0057] In one embodiment, the lipophilic moiety is an aliphatic, alicyclic, or polyalicyclic compound.

[0058] In one embodiment, the lipophilic moiety is selected from the group consisting of lipid, cholesterol, retinoic acid, cholic acid, adamantane acetic acid, 1-pyrene butyric acid, dihydrotestosterone, 1,3-bis-O(hexadecyl)glycerol, geranyloxyhexyanol, hexadecylglycerol, borneol, menthol, 1,3-propanediol, heptadecyl group, palmitic acid, myristic acid, 03-(oleoyl)lithocholic acid, 03-(oleoyl)cholenic acid, dimethoxytrityl, or phenoxazine. In certain embodiments, the lipophilic moiety is not cholesterol.

[0059] In one embodiment, the lipophilic moiety contains a saturated or unsaturated C4-C30 hydrocarbon chain, and an optional functional group selected from the group consisting of hydroxyl, amine, carboxylic acid, sulfonate, phosphate, thiol, azide, and alkyne.

[0060] In one embodiment, the lipophilic moiety contains a saturated or unsaturated C6-C18 hydrocarbon chain.

[0061] In one embodiment, the lipophilic moiety contains a saturated or unsaturated C16 hydrocarbon chain.

[0062] In one embodiment, the saturated or unsaturated C16 hydrocarbon chain is conjugated to position 6, counting from the 5′-end of the strand.

[0063] In one embodiment, the lipophilic moiety is conjugated via a carrier that replaces one or more nucleotide(s) in the internal position(s) or the double stranded region.

[0064] In one embodiment, the carrier is a cyclic group selected from the group consisting of pyrrolidinyl, pyrazolinyl, pyrazolidinyl, imidazolinyl, imidazolidinyl, piperidinyl, piperazinyl, [1,3]dioxolanyl, oxazolidinyl, isoxazolidinyl, morpholinyl, thiazolidinyl, isothiazolidinyl, quinoxalinyl, pyridazinonyl, tetrahydrofuranyl, and decalinyl; or is an acyclic moiety based on a serinol backbone or a diethanolamine backbone.

[0065] In one embodiment, the lipophilic moiety is conjugated to the double-stranded iRNA agent via a linker containing an ether, thioether, urea, carbonate, amine, amide, maleimide-thioether, disulfide, phosphodiester, sulfonamide linkage, a product of a click reaction, or carbamate.

[0066] In one embodiment, the lipophilic moiety is conjugated to a nucleobase, sugar moiety, or internucleosidic linkage.

[0067] In one embodiment, the double-stranded RNAi agent further includes a phosphate or phosphate mimic at the 5′-end of the antisense strand. Optionally, the phosphate mimic is a 5′-vinyl phosphonate (VP).

[0068] In certain embodiments, the RNAi agent does not include an inverted abasic nucleotide.

[0069] In certain embodiments, the double-stranded RNAi agent does not include a targeting ligand.

[0070] In certain embodiments, the double-stranded RNAi agent further includes a targeting ligand that targets a receptor which mediates delivery to a liver tissue, e.g., a lipophilic ligand. In certain embodiments, the targeting ligand is a C16 ligand. In certain embodiments, the lipophilic ligand is not a cholesterol moiety.

[0071] In one embodiment, the lipophilic moiety or a targeting ligand is conjugated via a bio-cleavable linker selected from the group consisting of DNA, RNA, disulfide, amide, functionalized monosaccharides or oligosaccharides of galactosamine, glucosamine, glucose, galactose, mannose, and combinations thereof.

[0072] In one embodiment, the 3′ end of the sense strand is protected via an end cap which is a cyclic group having an amine, said cyclic group being selected from the group consisting of pyrrolidinyl, pyrazolinyl, pyrazolidinyl, imidazolinyl, imidazolidinyl, piperidinyl, piperazinyl, [1,3]dioxolanyl, oxazolidinyl, isoxazolidinyl, morpholinyl, thiazolidinyl, isothiazolidinyl, quinoxalinyl, pyridazinonyl, tetrahydrofuranyl, and decalinyl.

[0073] In one embodiment, the dsRNA agent further comprises a targeting ligand that targets a liver tissue.

[0074] In one embodiment, the targeting ligand is a GalNAc conjugate.

[0075] In one embodiment, the dsRNA agent further comprises a terminal, chiral modification occurring at the first internucleotide linkage at the 3′ end of the antisense strand, having the linkage phosphorus atom in Sp configuration, a terminal, chiral modification occurring at the first internucleotide linkage at the 5′ end of the antisense strand, having the linkage phosphorus atom in Rp configuration, and a terminal, chiral modification occurring at the first internucleotide linkage at the 5′ end of the sense strand, having the linkage phosphorus atom in either Rp configuration or Sp configuration.

[0076] In one embodiment, the dsRNA agent further comprises a terminal, chiral modification occurring at the first and second internucleotide linkages at the 3′ end of the antisense strand, having the linkage phosphorus atom in Sp configuration, a terminal, chiral modification occurring at the first internucleotide linkage at the 5′ end of the antisense strand, having the linkage phosphorus atom in Rp configuration, and a terminal, chiral modification occurring at the first internucleotide linkage at the 5′ end of the sense strand, having the linkage phosphorus atom in either Rp or Sp configuration.

[0077] In one embodiment, the dsRNA agent further comprises a terminal, chiral modification occurring at the first, second and third internucleotide linkages at the 3′ end of the antisense strand, having the linkage phosphorus atom in Sp configuration, a terminal, chiral modification occurring at the first internucleotide linkage at the 5′ end of the antisense strand, having the linkage phosphorus atom in Rp configuration, and a terminal, chiral modification occurring at the first internucleotide linkage at the 5′ end of the sense strand, having the linkage phosphorus atom in either Rp or Sp configuration.

[0078] In one embodiment, the dsRNA agent further comprises a terminal, chiral modification occurring at the first, and second internucleotide linkages at the 3′ end of the antisense strand, having the linkage phosphorus atom in Sp configuration, a terminal, chiral modification occurring at the third internucleotide linkages at the 3′ end of the antisense strand, having the linkage phosphorus atom in Rp configuration, a terminal, chiral modification occurring at the first internucleotide linkage at the 5′ end of the antisense strand, having the linkage phosphorus atom in Rp configuration, and a terminal, chiral modification occurring at the first internucleotide linkage at the 5′ end of the sense strand, having the linkage phosphorus atom in either Rp or Sp configuration.

[0079] In one embodiment, the dsRNA agent further comprises a terminal, chiral modification occurring at the first, and second internucleotide linkages at the 3′ end of the antisense strand, having the linkage phosphorus atom in Sp configuration, a terminal, chiral modification occurring at the first, and second internucleotide linkages at the 5′ end of the antisense strand, having the linkage phosphorus atom in Rp configuration, and a terminal, chiral modification occurring at the first internucleotide linkage at the 5′ end of the sense strand, having the linkage phosphorus atom in either Rp or Sp configuration.

[0080] In one embodiment, the dsRNA agent further comprises a phosphate or phosphate mimic at the 5′-end of the antisense strand.

[0081] In one embodiment, the phosphate mimic is a 5′-vinyl phosphonate (VP). When the phosphate mimic is a 5′-vinyl phosphonate (VP), the 5′-terminal nucleotide can have the following structure,

[chemical structure]

[0082] wherein * indicates the location of the bond to 5′-position of the adjacent nucleotide;
[0083] R is hydrogen, hydroxy, methoxy, fluoro, or another 2′-modification described herein (e.g., hydroxy or methoxy); and
[0084] B is a nucleobase or a modified nucleobase, optionally where B is adenine, guanine, cytosine, thymine or uracil.

[0085] In one embodiment, the base pair at the 1 position of the 5′-end of the antisense strand of the duplex is an AU base pair.

[0086] In one embodiment, the sense strand has a total of 21 nucleotides and the antisense strand has a total of 23 nucleotides.

[0087] The present invention further provides cells, pharmaceutical compositions for inhibiting expression of a GPR75 gene, and pharmaceutical composition comprising a lipid formulation.comprising the dsRNA agent of the invention.

[0088] In one aspect, the present invention provides a method of inhibiting expression of a GPR75 gene in a cell. The method includes contacting the cell with the dsRNA agent of the invention, or the pharmaceutical composition of the invention; and maintaining the cell produced in step (a) for a time sufficient to obtain degradation of the mRNA transcript of a GPR75 gene, thereby inhibiting expression of the GPR75 gene in the cell.

[0089] In one embodiment, the cell is within a subject.

[0090] In one embodiment, the subject is a human.

[0091] In one embodiment, the expression of the GPR75 gene is inhibited by at least 50%.

[0092] In one aspect, the present invention provides a method of treating a subject having a GPR75-associated disorder, e.g., a body weight disorder, such as obesity, or a subject at risk of developing a body weight disorder, such as a subject at risk of becoming obese, e.g., a subject that is overweight or a subject that was overweight or obese, lost weight, but failed to maintain weight loss. The method includes administering to the subject a therapeutically effective amount of the dsRNA agent of the invention, or the pharmaceutical composition of the invention, thereby treating the subject.

[0093] In one embodiment, the subject is a human.

[0094] In one embodiment, treating comprises amelioration of at least on sign or symptom of the disease. In some embodiments, administration of the dsRNA agent results in a reduction in the BMI of the subject. In some embodiments, administration of the dsRNA agent results in a reduction in the blood glucose level of the subject. In other embodiments, administration of the dsRNA agent results in a reduction in the blood lipid level of the subject.

[0095] In one embodiment, the dsRNA agent is administered to the subject at a dose of about 0.01 mg/kg to about 50 mg/kg.

[0096] In some embodiments, the double stranded RNAi agent is administered to the subject intrathecally.

[0097] In some embodiments, the double stranded RNAi agent is administered to the subject subcutaneously.

[0098] In one embodiment, the method further comprises administering to the subject an additional agent or a therapy suitable for treatment or prevention of a GPR75-associated disorder.

[0099] In one embodiment, the additional therapeutic agent is selected from the group consisting of a diabetes mellitus-treating agent, a diabetic complication-treating agent, a cardiovascular diseases-treating agent, an anti-hyperlipemic agent, a hypotensive or antihypertensive agent, an anti-obesity agent, a nonalcoholic steatohepatitis (NASH)-treating agent, a chemotherapeutic agent, an immunotherapeutic agent, an immunosuppressive agent, an anti-inflammatory agent, an anti-steatosis agent, an anti-fibrosis agent, an immune modulator, a tyrosine kinase inhibitor, an antifibrotic agent, and a combination of any of the foregoing.

[0100] The present invention is further illustrated by the following detailed description.

### BRIEF DESCRIPTION OF THE DRAWINGS

[0101] FIG. 1 is a graph depicting the relative quantification of Gpr75 mRNA levels normalized to ActB and Gapdh in the brains of diet-induced obese mice 21 days after intracerebroventricular injection of a single 150 μg dose of the indicated duplexes, or control. *, denotes P<0.05 vs control siRNA.

### DETAILED DESCRIPTION OF THE INVENTION

[0102] The present invention provides iRNA compositions which effect the RNA-induced silencing complex (RISC)-mediated cleavage of RNA transcripts of a GPR75 gene. The GPR75 gene may be within a cell, e.g., a cell within a subject, such as a human. The use of these iRNAs enables the targeted degradation of mRNAs of the corresponding gene (a GPR75 gene) in mammals. The present disclosure also provides methods of using the RNAi compositions of the disclosure for inhibiting the expression of a GPR75 gene for treating a subject having a disorder that would benefit from inhibiting or reducing the expression of a GPR75 gene, e.g., a GPR75-associated disorder, such as a body weight disorder, e.g., obesity, or a subject at risk of developing a body weight disorder, such as obesity, e.g., a subject that is overweight or a subject that was overweight or obese, lost weight, but failed to maintain weight loss.

[0103] The iRNAs of the invention include an RNA strand (the antisense strand) having a region which is up to about 30 nucleotides or less in length, e.g., 15-30, 15-29, 15-28, 15-27, 15-26, 15-25, 15-24, 15-23, 15-22, 15-21, 15-20, 15-19, 15-18, 15-17, 18-30, 18-29, 18-28, 18-27, 18-26, 18-25, 18-24, 18-23, 18-22, 18-21, 18-20, 19-30, 19-29, 19-28, 19-27, 19-26, 19-25, 19-24, 19-23, 19-22, 19-21, 19-20, 20-30, 20-29, 20-28, 20-27, 20-26, 20-25, 20-24,20-23, 20-22, 20-21, 21-30, 21-29, 21-28, 21-27, 21-26, 21-25, 21-24, 21-23, or 21-22 nucleotides in length, which region is substantially complementary to at least part of an mRNA transcript of a GPR75 gene. In certain embodiments, the RNAi agents of the disclosure include an RNA strand (the antisense strand) having a region which is about 21-23 nucleotides in length, which region is substantially complementary to at least part of an mRNA transcript of a GPR75 gene.

[0104] In certain embodiments, one or both of the strands of the double stranded RNAi agents of the invention is up to 66 nucleotides in length, e.g., 36-66, 26-36, 25-36, 31-60, 22-43, 27-53 nucleotides in length, with a region of at least 19 contiguous nucleotides that is substantially complementary to at least a part of an mRNA of a GPR75 gene. In some embodiments, such iRNA agents having longer length antisense strands can, for example, include a second RNA strand (the sense strand) of 20-60 nucleotides in length wherein the sense and antisense strands form a duplex of 18-30 contiguous nucleotides.

[0105] The use of iRNAs of the invention enables the targeted degradation of the GPR75 mRNAs in mammals. Thus, methods and compositions including these iRNAs are useful for treating a subject having a GPR75-associated disorder, such as a body weight disorder, e.g., obesity, or a subject at risk of developing a body weight disorder, such as obesity, e.g., a subject that is overweight or a subject that was overweight or obese, lost weight, but failed to maintain weight loss.

[0106] The following detailed description discloses how to make and use compositions containing iRNAs to inhibit the expression of a GPR75 gene s as well as compositions, uses, and methods for treating subjects that would benefit from inhibition and/or reduction of the expression of a GPR75 gene, e.g., subjects susceptible to or diagnosed with a GPR75-associated disorder.

### I. Definitions

[0107] In order that the present invention may be more readily understood, certain terms are first defined. In addition, it should be noted that whenever a value or range of values of a parameter are recited, it is intended that values and ranges intermediate to the recited values are also intended to be part of this invention.

[0108] The articles “a” and “an” are used herein to refer to one or to more than one (i.e., to at least one) of the grammatical object of the article. By way of example, “an element” means one element or more than one element, e.g., a plurality of elements.

[0109] The term “including” is used herein to mean, and is used interchangeably with, the phrase “including but not limited to”.

[0110] The term “or” is used herein to mean, and is used interchangeably with, the term “and/or,” unless context clearly indicates otherwise.

[0111] The term “about” is used herein to mean within the typical ranges of tolerances in the art. For example, “about” can be understood as about 2 standard deviations from the mean. In certain embodiments, about means+10%. In certain embodiments, about means+5%. When about is present before a series of numbers or a range, it is understood that “about” can modify each of the numbers in the series or range.

[0112] The term “at least”, “no less than”, or “or more” prior to a number or series of numbers is understood to include the number adjacent to the term “at least”, and all subsequent numbers or integers that could logically be included, as clear from context. For example, the number of nucleotides in a nucleic acid molecule must be an integer. For example, “at least 18 nucleotides of a 21 nucleotide nucleic acid molecule” means that 18, 19, 20, or 21 nucleotides have the indicated property. When at least is present before a series of numbers or a range, it is understood that “at least” can modify each of the numbers in the series or range.

[0113] As used herein, “no more than” or “or less” is understood as the value adjacent to the phrase and logical lower values or integers, as logical from context, to zero. For example, a duplex with an overhang of “no more than 2 nucleotides” has a 2, 1, or 0 nucleotide overhang. When “no more than” is present before a series of numbers or a range, it is understood that “no more than” can modify each of the numbers in the series or range. As used herein, ranges include both the upper and lower limit.

[0114] As used herein, methods of detection can include determination that the amount of analyte present is below the level of detection of the method.

[0115] In the event of a conflict between an indicated target site and the nucleotide sequence for a sense or antisense strand, the indicated sequence takes precedence.

[0116] In the event of a conflict between a sequence and its indicated site on a transcript or other sequence, the nucleotide sequence recited in the specification takes precedence.

[0117] As used herein, the term “G protein-coupled receptor 75” (“GPR75”) refers to the well-known gene and polypeptide, also known in the art as “Probable G-Protein Coupled Receptor 75,” “WI-31133,” “GPRchr2,” and “WI31133.” GPR75 binds to 20-HETE and interferes with insulin signaling leading to obesity.

[0118] The term “GPR75” includes human GPR75, the amino acid and nucleotide sequences of which may be found in, for example, GenBank Accession No. NM_006794.4 (SEQ ID NO:1); mouse GPR75, the amino acid and nucleotide sequence of which may be found in, for example, GenBank Accession No. NM_175490.4 (SEQ ID NO: 2); and rat GPR75, the amino acid and nucleotide sequence of which may be found in, for example, GenBank Accession No.: NM_001109096.1 (SEQ ID NO: 3).

[0119] The term “GPR75” also includes Macaca mulatta GPR75, the amino acid and nucleotide sequence of which may be found in, for example, GenBank Accession No. NM_001204509.2 (SEQ ID NO:4).

[0120] Additional examples of GPR75 mRNA sequences are readily available using, e.g., GenBank, UniProt, OMIM, and the Macaca genome project web site.

[0121] Exemplary GPR75 nucleotide sequences may also be found in SEQ ID NOs:1-4. SEQ ID NOs:5-8 are the reverse complement sequences of SEQ ID NOs:1-4, respectively.

[0122] Further information on GPR75 is provided, for example in the NCBI Gene database at www.ncbi.nlm.nih.gov/gene/10936.

[0123] The entire contents of each of the foregoing GenBank Accession numbers and the Gene database numbers are incorporated herein by reference as of the date of filing this application.

[0124] The terms “G protein-coupled receptor 75” and “GPR75,” as used herein, also refers to naturally occurring DNA sequence variations of the GPR75 gene. Numerous sequence variations within the GPR75 gene have been identified and may be found at, for example, NCBI dbSNP and UniProt (see, e.g., https://www.ncbi.nlm.nih.gov/snp/?term=GPR75), the entire contents of which is incorporated herein by reference as of the date of filing this application.

[0125] As used herein, “target sequence” refers to a contiguous portion of the nucleotide sequence of an mRNA molecule formed during the transcription of a GPR75 gene, including mRNA that is a product of RNA processing of a primary transcription product. In one embodiment, the target portion of the sequence will be at least long enough to serve as a substrate for RNAi-directed cleavage at or near that portion of the nucleotide sequence of an mRNA molecule formed during the transcription of a GPR75 gene. In one embodiment, the target sequence is within the protein coding region of the GPR75 gene. In another embodiment, the target sequence is within the 3′ UTR of the GPR75 gene.

[0126] The target sequence may be from about 9-36 nucleotides in length, e.g., about 15-30 nucleotides in length. For example, the target sequence can be about 15-30 nucleotides, 15-29, 15-28, 15-27, 15-26, 15-25, 15-24, 15-23, 15-22, 15-21, 15-20, 15-19, 15-18, 15-17, 18-30, 18-29, 18-28, 18-27, 18-26, 18-25, 18-24, 18-23, 18-22, 18-21, 18-20, 19-30, 19-29, 19-28, 19-27, 19-26, 19-25, 19-24, 19-23, 19-22, 19-21, 19-20, 20-30, 20-29, 20-28, 20-27, 20-26, 20-25, 20-24, 20-23, 20-22, 20-21, 21-30, 21-29, 21-28, 21-27, 21-26, 21-25, 21-24, 21-23, or 21-22 nucleotides in length. In some embodiments, the target sequence is about 19 to about 30 nucleotides in length. In other embodiments, the target sequence is about 19 to about 25 nucleotides in length. In still other embodiments, the target sequence is about 19 to about 23 nucleotides in length. In some embodiments, the target sequence is about 21 to about 23 nucleotides in length. Ranges and lengths intermediate to the above recited ranges and lengths are also contemplated to be part of the invention.

[0127] As used herein, the term “strand comprising a sequence” refers to an oligonucleotide comprising a chain of nucleotides that is described by the sequence referred to using the standard nucleotide nomenclature.

[0128] “G,” “C,” “A,” “T,” and “U” each generally stand for a nucleotide that contains guanine, cytosine, adenine, thymidine, and uracil as a base, respectively. However, it will be understood that the term “ribonucleotide” or “nucleotide” can also refer to a modified nucleotide, as further detailed below, or a surrogate replacement moiety (see, e.g., Table 1). The skilled person is well aware that guanine, cytosine, adenine, and uracil can be replaced by other moieties without substantially altering the base pairing properties of an oligonucleotide comprising a nucleotide bearing such replacement moiety. It is understood that when a cDNA sequence is provided, the corresponding mRNA or RNAi agent would include a U in place of a T. For example, without limitation, a nucleotide comprising inosine as its base can base pair with nucleotides containing adenine, cytosine, or uracil. Hence, nucleotides containing uracil, guanine, or adenine can be replaced in the nucleotide sequences of dsRNA featured in the invention by a nucleotide containing, for example, inosine. In another example, adenine and cytosine anywhere in the oligonucleotide can be replaced with guanine and uracil, respectively to form G-U Wobble base pairing with the target mRNA. Sequences containing such replacement moieties are suitable for the compositions and methods featured in the invention. Further, one of skill in the art that a T is a target gene sequence, or reverse complement thereof, would often be replaced by a U in an RNAi agent of the invention.

[0129] The terms “iRNA”, “RNAi agent,” “iRNA agent,” “RNA interference agent” as used interchangeably herein, refer to an agent that contains RNA as that term is defined herein, and which mediates the targeted cleavage of an RNA transcript via an RNA-induced silencing complex (RISC) pathway. RNA interference (RNAi) is a process that directs the sequence-specific degradation of mRNA. RNAi modulates, e.g., inhibits, the expression of a GPR75 gene in a cell, e.g., a cell within a subject, such as a mammalian subject.

[0130] In one embodiment, an RNAi agent of the disclosure includes a single stranded RNAi that interacts with a target RNA sequence, e.g., a GPR75 mRNA sequence, to direct the cleavage of the target RNA. Without wishing to be bound by theory it is believed that long double stranded RNA introduced into cells is broken down into double-stranded short interfering RNAs (siRNAs) comprising a sense strand and an antisense strand by a Type III endonuclease known as Dicer (Sharp et al. (2001) Genes Dev. 15:485). Dicer, a ribonuclease-III-like enzyme, processes these dsRNA into 19-23 base pair short interfering RNAs with characteristic two base 3′ overhangs (Bernstein, et al., (2001) Nature 409:363). These siRNAs are then incorporated into an RNA-induced silencing complex (RISC) where one or more helicases unwind the siRNA duplex, enabling the complementary antisense strand to guide target recognition (Nykanen, et al., (2001) Cell 107:309). Upon binding to the appropriate target mRNA, one or more endonucleases within the RISC cleave the target to induce silencing (Elbashir, et al., (2001) Genes Dev. 15:188). Thus, in one aspect the disclosure relates to a single stranded RNA (ssRNA) (the antisense strand of a siRNA duplex) generated within a cell and which promotes the formation of a RISC complex to effect silencing of the target gene. Accordingly, the term “siRNA” is also used herein to refer to an RNAi as described above.

[0131] In another embodiment, the RNAi agent may be a single-stranded RNA that is introduced into a cell or organism to inhibit a target mRNA. Single-stranded RNAi agents bind to the RISC endonuclease, Argonaute 2, which then cleaves the target mRNA. The single-stranded siRNAs are generally 15-30 nucleotides and are chemically modified. The design and testing of single-stranded RNAs are described in U.S. Pat. No. 8,101,348 and in Lima et al., (2012) Cell 150:883-894, the entire contents of each of which are hereby incorporated herein by reference. Any of the antisense nucleotide sequences described herein may be used as a single-stranded siRNA as described herein or as chemically modified by the methods described in Lima et al., (2012) Cell 150:883-894.

[0132] In another embodiment, a “RNAi agent” for use in the compositions and methods of the disclosure is a double stranded RNA and is referred to herein as a “double stranded RNAi agent,” “double stranded RNA (dsRNA) molecule,” “dsRNA agent,” or “dsRNA”. The term “dsRNA” refers to a complex of ribonucleic acid molecules, having a duplex structure comprising two anti-parallel and substantially complementary nucleic acid strands, referred to as having “sense” and “antisense” orientations with respect to a target RNA, i.e., a GPR75 mRNA sequence. In some embodiments of the disclosure, a double stranded RNA (dsRNA) triggers the degradation of a target RNA, e.g., an mRNA, through a post-transcriptional gene-silencing mechanism referred to herein as RNA interference or RNAi.

[0133] In general, a dsRNA molecule can include ribonucleotides, but as described in detail herein, each or both strands can also include one or more non-ribonucleotides, e.g., a deoxyribonucleotide, a modified nucleotide. In addition, as used in this specification, an “RNAi agent” may include ribonucleotides with chemical modifications; an RNAi agent may include substantial modifications at multiple nucleotides.

[0134] As used herein, the term “modified nucleotide” refers to a nucleotide having, independently, a modified sugar moiety, a modified internucleotide linkage, or a modified nucleobase. Thus, the term modified nucleotide encompasses substitutions, additions or removal of, e.g., a functional group or atom, to internucleoside linkages, sugar moieties, or nucleobases. The modifications suitable for use in the agents of the disclosure include all types of modifications disclosed herein or known in the art. Any such modifications, as used in a siRNA type molecule, are encompassed by “RNAi agent” for the purposes of this specification and claims.

[0135] In certain embodiments of the instant disclosure, inclusion of a deoxy-nucleotide—which is acknowledged as a naturally occurring form of nucleotide—if present within a RNAi agent can be considered to constitute a modified nucleotide.

[0136] The duplex region may be of any length that permits specific degradation of a desired target RNA through a RISC pathway, and may range from about 9 to 36 base pairs in length, e.g., about 15-base pairs in length, for example, about 9, 10, 11, 12, 13, 14, 15, 16, 17, 18, 19, 20, 21, 22, 23, 24, 25, 26, 27, 28, 29, 30, 31, 32, 33, 34, 35, or 36 base pairs in length, such as about 15-30, 15-29, 15-28, 15-27, 15-26, 15-25, 15-24, 15-23, 15-22, 15-21, 15-20, 15-19, 15-18, 15-17, 18-30, 18-29, 18-28, 18-27, 18-26, 18-25, 18-24, 18-23, 18-22, 18-21, 18-20, 19-30, 19-29, 19-28, 19-27, 19-26, 19-25, 19-24, 19-23, 19-22, 19-21, 19-20, 20-30, 20-29, 20-28, 20-27, 20-26, 20-25, 20-24,20-23, 20-22, 20-21, 21-30, 21-29, 21-28, 21-27, 21-26, 21-25, 21-24, 21-23, or 21-22 base pairs in length. Ranges and lengths intermediate to the above recited ranges and lengths are also contemplated to be part of the invention.

[0137] The two strands forming the duplex structure may be different portions of one larger RNA molecule, or they may be separate RNA molecules. Where the two strands are part of one larger molecule, and therefore are connected by an uninterrupted chain of nucleotides between the 3′-end of one strand and the 5′-end of the respective other strand forming the duplex structure, the connecting RNA chain is referred to as a “hairpin loop.” A hairpin loop can comprise at least one unpaired nucleotide. In some embodiments, the hairpin loop can comprise at least 4, at least 5, at least 6, at least 7, at least 8, at least 9, at least 10, at least 20, at least 23 or more unpaired nucleotides or nucleotides not directed to the target site of the dsRNA. In some embodiments, the hairpin loop can be or fewer nucleotides. In some embodiments, the hairpin loop can be 8 or fewer unpaired nucleotides. In some embodiments, the hairpin loop can be 4-10 unpaired nucleotides. In some embodiments, the hairpin loop can be 4-8 nucleotides.

[0138] In certain embodiment, the two strands of double-stranded oligomeric compound can be linked together. The two strands can be linked to each other at both ends, or at one end only. By linking at one end is meant that 5′-end of first strand is linked to the 3′-end of the second strand or 3′-end of first strand is linked to 5′-end of the second strand. When the two strands are linked to each other at both ends, 5′-end of first strand is linked to 3′-end of second strand and 3′-end of first strand is linked to 5′-end of second strand. The two strands can be linked together by an oligonucleotide linker including, but not limited to, (N)n; wherein N is independently a modified or unmodified nucleotide and n is 3-23. In some embodiments, n is 3-10, e.g., 3, 4, 5, 6, 7, 8, 9, or 10. In some embodiments, the oligonucleotide linker is selected from the group consisting of GNRA, (G)4, (U)4, and (dT)4, wherein N is a modified or unmodified nucleotide and R is a modified or unmodified purine nucleotide. Some of the nucleotides in the linker can be involved in base-pair interactions with other nucleotides in the linker. The two strands can also be linked together by a non-nucleosidic linker, e.g. a linker described herein. It will be appreciated by one of skill in the art that any oligonucleotide chemical modifications or variations describe herein can be used in the oligonucleotide linker.

[0139] Hairpin and dumbbell type oligomeric compounds will have a duplex region equal to or at least 14, 15, 15, 16, 17, 18, 19, 29, 21, 22, 23, 24, or 25 nucleotide pairs. The duplex region can be equal to or less than 200, 100, or 50, in length. In some embodiments, ranges for the duplex region are 15-30, 17 to 23, 19 to 23, and 19 to 21 nucleotides pairs in length.

[0140] The hairpin oligomeric compounds can have a single strand overhang or terminal unpaired region, in some embodiments at the 3′, and in some embodiments on the antisense side of the hairpin. In some embodiments, the overhangs are 1-4, more generally 2-3 nucleotides in length. The hairpin oligomeric compounds that can induce RNA interference are also referred to as “shRNA” herein.

[0141] Where the two substantially complementary strands of a dsRNA are comprised by separate RNA molecules, those molecules need not, but can be covalently connected. Where the two strands are connected covalently by means other than an uninterrupted chain of nucleotides between the 3′-end of one strand and the 5′-end of the respective other strand forming the duplex structure, the connecting structure is referred to as a “linker.” The RNA strands may have the same or a different number of nucleotides. The maximum number of base pairs is the number of nucleotides in the shortest strand of the dsRNA minus any overhangs that are present in the duplex. In addition to the duplex structure, an RNAi may comprise one or more nucleotide overhangs.

[0142] In one embodiment, an RNAi agent of the invention is a dsRNA, each strand of which is 24-30 nucleotides in length, that interacts with a target RNA sequence, e.g., a GPR75 mRNA sequence, to direct the cleavage of the target RNA. Without wishing to be bound by theory, long double stranded RNA introduced into cells is broken down into siRNA by a Type III endonuclease known as Dicer (Sharp et al. (2001) Genes Dev. 15:485). Dicer, a ribonuclease-III-like enzyme, processes the dsRNA into 19-23 base pair short interfering RNAs with characteristic two base 3′ overhangs (Bernstein, et al., (2001) Nature 409:363). The siRNAs are then incorporated into an RNA-induced silencing complex (RISC) where one or more helicases unwind the siRNA duplex, enabling the complementary antisense strand to guide target recognition (Nykanen, et al., (2001) Cell 107:309). Upon binding to the appropriate target mRNA, one or more endonucleases within the RISC cleave the target to induce silencing (Elbashir, et al., (2001) Genes Dev. 15:188).

[0143] In one embodiment, an RNAi agent of the invention is a dsRNA agent, each strand of which comprises 19-23 nucleotides that interacts with a GPR75 mRNA sequence to direct the cleavage of the target RNA. Without wishing to be bound by theory, long double stranded RNA introduced into cells is broken down into siRNA by a Type III endonuclease known as Dicer (Sharp et al. (2001) Genes Dev. 15:485). Dicer, a ribonuclease-III-like enzyme, processes the dsRNA into 19-23 base pair short interfering RNAs with characteristic two base 3′ overhangs (Bernstein, et al., (2001) Nature 409:363). The siRNAs are then incorporated into an RNA-induced silencing complex (RISC) where one or more helicases unwind the siRNA duplex, enabling the complementary antisense strand to guide target recognition (Nykanen, et al., (2001) Cell 107:309). Upon binding to the appropriate target mRNA, one or more endonucleases within the RISC cleave the target to induce silencing (Elbashir, et al., (2001) Genes Dev. 15:188). In one embodiment, an RNAi agent of the invention is a dsRNA of 24-30 nucleotides that interacts with a GPR75 mRNA sequence to direct the cleavage of the target RNA.

[0144] As used herein, the term “nucleotide overhang” refers to at least one unpaired nucleotide that protrudes from the duplex structure of a RNAi agent, e.g., a dsRNA. For example, when a 3′-end of one strand of a dsRNA extends beyond the 5′-end of the other strand, or vice versa, there is a nucleotide overhang. A dsRNA can comprise an overhang of at least one nucleotide; alternatively, the overhang can comprise at least two nucleotides, at least three nucleotides, at least four nucleotides, at least five nucleotides or more. A nucleotide overhang can comprise or consist of a nucleotide/nucleoside analog, including a deoxynucleotide/nucleoside. The overhang(s) can be on the sense strand, the antisense strand or any combination thereof. Furthermore, the nucleotide(s) of an overhang can be present on the 5′-end, 3′-end or both ends of either an antisense or sense strand of a dsRNA.

[0145] In one embodiment of the dsRNA, at least one strand comprises a 3′ overhang of at least 1 nucleotide. In another embodiment, at least one strand comprises a 3′ overhang of at least 2 nucleotides, e.g., 2, 3, 4, 5, 6, 7, 9, 10, 11, 12, 13, 14, or 15 nucleotides. In other embodiments, at least one strand of the RNAi agent comprises a 5′ overhang of at least 1 nucleotide. In certain embodiments, at least one strand comprises a 5′ overhang of at least 2 nucleotides, e.g., 2, 3, 4, 5, 6, 7, 9, 10, 11, 12, 13, 14, or 15 nucleotides. In still other embodiments, both the 3′ and the 5′ end of one strand of the RNAi agent comprise an overhang of at least 1 nucleotide.

[0146] In one embodiment, the antisense strand of a dsRNA has a 1-10 nucleotide, e.g., 0-3, 1-3, 2-4, 2-5, 4-10, 5-10, e.g., a 1, 2, 3, 4, 5, 6, 7, 8, 9, or 10 nucleotide, overhang at the 3′-end or the 5′-end.

[0147] In one embodiment, the sense strand of a dsRNA has a 1-10 nucleotide, e.g., a 1, 2, 3, 4, 5, 6, 7, 8, 9, or 10 nucleotide, overhang at the 3′-end or the 5′-end. In another embodiment, one or more of the nucleotides in the overhang is replaced with a nucleoside thiophosphate.

[0148] In certain embodiments, the overhang on the sense strand or the antisense strand, or both, can include extended lengths longer than 10 nucleotides, e.g., 1-30 nucleotides, 2-30 nucleotides, 10-30 nucleotides, or 10-15 nucleotides in length. In certain embodiments, an extended overhang is on the sense strand of the duplex. In certain embodiments, an extended overhang is present on the 3′ end of the sense strand of the duplex. In certain embodiments, an extended overhang is present on the 5′ end of the sense strand of the duplex. In certain embodiments, an extended overhang is on the antisense strand of the duplex. In certain embodiments, an extended overhang is present on the 3′ end of the antisense strand of the duplex. In certain embodiments, an extended overhang is present on the 5′ end of the antisense strand of the duplex. In certain embodiments, one or more of the nucleotides in the overhang is replaced with a nucleoside thiophosphate. In certain embodiments, the overhang includes a self-complementary portion such that the overhang is capable of forming a hairpin structure that is stable under physiological conditions.

[0149] The terms “blunt” or “blunt ended” as used herein in reference to a dsRNA mean that there are no unpaired nucleotides or nucleotide analogs at a given terminal end of a dsRNA, i.e., no nucleotide overhang. One or both ends of a dsRNA can be blunt. Where both ends of a dsRNA are blunt, the dsRNA is said to be blunt ended. To be clear, a “blunt ended” dsRNA is a dsRNA that is blunt at both ends, i.e., no nucleotide overhang at either end of the molecule. Most often such a molecule will be double stranded over its entire length.

[0150] The term “antisense strand” or “guide strand” refers to the strand of an iRNA, e.g., a dsRNA, which includes a region that is substantially complementary to a target sequence, e.g., a GPR75 mRNA sequence.

[0151] As used herein, the term “region of complementarity” refers to the region on the antisense strand that is substantially complementary to a sequence, for example a target sequence, e.g., a GPR75 nucleotide sequence, as defined herein. Where the region of complementarity is not fully complementary to the target sequence, the mismatches can be in the internal or terminal regions of the molecule. Generally, the most tolerated mismatches are in the terminal regions, e.g., within 5, 4, 3, or 2 nucleotides of the 5′- or 3′-terminus of the RNAi agent.

[0152] In some embodiments, a double stranded RNA agent of the invention includes a nucleotide mismatch in the antisense strand. In some embodiments, the antisense strand of the double stranded RNA agent of the invention includes no more than 4 mismatches with the target mRNA, e.g., the antisense strand includes 4, 3, 2, 1, or 0 mismatches with the target mRNA. In some embodiments, the antisense strand double stranded RNA agent of the invention includes no more than 4 mismatches with the sense strand, e.g., the antisense strand includes 4, 3, 2, 1, or 0 mismatches with the sense strand. In some embodiments, a double stranded RNA agent of the invention includes a nucleotide mismatch in the sense strand. In some embodiments, the sense strand of the double stranded RNA agent of the invention includes no more than 4 mismatches with the antisense strand, e.g., the sense strand includes 4, 3, 2, 1, or 0 mismatches with the antisense strand. In some embodiments, the nucleotide mismatch is, for example, within 5, 4, 3 nucleotides from the 3′-end of the iRNA. In another embodiment, the nucleotide mismatch is, for example, in the 3′-terminal nucleotide of the iRNA agent. In some embodiments, the mismatch(s) is not in the seed region.

[0153] Thus, an RNAi agent as described herein can contain one or more mismatches to the target sequence. In one embodiment, a RNAi agent as described herein contains no more than 3 mismatches (i.e., 3, 2, 1, or 0 mismatches). In one embodiment, an RNAi agent as described herein contains no more than 2 mismatches. In one embodiment, an RNAi agent as described herein contains no more than 1 mismatch. In one embodiment, an RNAi agent as described herein contains 0 mismatches. In certain embodiments, if the antisense strand of the RNAi agent contains mismatches to the target sequence, the mismatch can optionally be restricted to be within the last 5 nucleotides from either the 5′- or 3′-end of the region of complementarity. For example, in such embodiments, for a 23 nucleotide RNAi agent, the strand which is complementary to a region of a GPR75 gene, generally does not contain any mismatch within the central 13 nucleotides. The methods described herein or methods known in the art can be used to determine whether an RNAi agent containing a mismatch to a target sequence is effective in inhibiting the expression of a GPR75 gene. Consideration of the efficacy of RNAi agents with mismatches in inhibiting expression of a GPR75 gene is important, especially if the particular region of complementarity in a GPR75 gene is known to vary.

[0154] The term “sense strand” or “passenger strand” as used herein, refers to the strand of a RNAi agent that includes a region that is substantially complementary to a region of the antisense strand as that term is defined herein.

[0155] As used herein, “substantially all of the nucleotides are modified” are largely but not wholly modified and can include not more than 5, 4, 3, 2, or 1 unmodified nucleotides.

[0156] As used herein, the term “cleavage region” refers to a region that is located immediately adjacent to the cleavage site. The cleavage site is the site on the target at which cleavage occurs. In some embodiments, the cleavage region comprises three bases on either end of, and immediately adjacent to, the cleavage site. In some embodiments, the cleavage region comprises two bases on either end of, and immediately adjacent to, the cleavage site. In some embodiments, the cleavage site specifically occurs at the site bound by nucleotides 10 and 11 of the antisense strand, and the cleavage region comprises nucleotides 11, 12 and 13.

[0157] As used herein, and unless otherwise indicated, the term “complementary,” when used to describe a first nucleotide sequence in relation to a second nucleotide sequence, refers to the ability of an oligonucleotide or polynucleotide comprising the first nucleotide sequence to hybridize and form a duplex structure under certain conditions with an oligonucleotide or polynucleotide comprising the second nucleotide sequence, as will be understood by the skilled person. Such conditions can be, for example, “stringent conditions”, where stringent conditions can include: 400 mM NaCl, 40 mM PIPES pH 6.4, 1 mM EDTA, 50° C. or 70° C. for 12-16 hours followed by washing (see, e.g., “Molecular Cloning: A Laboratory Manual, Sambrook, et al. (1989) Cold Spring Harbor Laboratory Press). Other conditions, such as physiologically relevant conditions as can be encountered inside an organism, can apply. The skilled person will be able to determine the set of conditions most appropriate for a test of complementarity of two sequences in accordance with the ultimate application of the hybridized nucleotides.

[0158] Complementary sequences within a RNAi agent, e.g., within a dsRNA as described herein, include base-pairing of the oligonucleotide or polynucleotide comprising a first nucleotide sequence to an oligonucleotide or polynucleotide comprising a second nucleotide sequence over the entire length of one or both nucleotide sequences. Such sequences can be referred to as “fully complementary” with respect to each other herein. However, where a first sequence is referred to as “substantially complementary” with respect to a second sequence herein, the two sequences can be fully complementary, or they can form one or more, but generally not more than 5, 4, 3, or 2 mismatched base pairs upon hybridization for a duplex up to 30 base pairs, while retaining the ability to hybridize under the conditions most relevant to their ultimate application, e.g., inhibition of gene expression, in vitro or in vivo. However, where two oligonucleotides are designed to form, upon hybridization, one or more single stranded overhangs, such overhangs shall not be regarded as mismatches with regard to the determination of complementarity. For example, a dsRNA comprising one oligonucleotide 21 nucleotides in length and another oligonucleotide 23 nucleotides in length, wherein the longer oligonucleotide comprises a sequence of 21 nucleotides that is fully complementary to the shorter oligonucleotide, can yet be referred to as “fully complementary” for the purposes described herein.

[0159] “Complementary” sequences, as used herein, can also include, or be formed entirely from, non-Watson-Crick base pairs or base pairs formed from non-natural and modified nucleotides, in so far as the above requirements with respect to their ability to hybridize are fulfilled. Such non-Watson-Crick base pairs include, but are not limited to, G:U Wobble or Hoogsteen base pairing.

[0160] The terms “complementary,” “fully complementary” and “substantially complementary” herein can be used with respect to the base matching between the sense strand and the antisense strand of a dsRNA, or between two oligonucleotides or polynucleotides, such as the antisense strand of a RNAi agent and a target sequence, as will be understood from the context of their use.

[0161] As used herein, a polynucleotide that is “substantially complementary to at least part of” a messenger RNA (mRNA) or target sequence refers to a polynucleotide that is substantially complementary to a contiguous portion of the mRNA of interest or target sequence (e.g., an mRNA encoding GPR75). For example, a polynucleotide is complementary to at least a part of a GPR75 RNA if the sequence is substantially complementary to a non-interrupted portion of an mRNA encoding GPR75.

[0162] Accordingly, in some embodiments, the antisense strand polynucleotides disclosed herein are fully complementary to the target GPR75 sequence.

[0163] In other embodiments, the antisense strand polynucleotides disclosed herein are substantially complementary to the target GPR75 sequence and comprise a contiguous nucleotide sequence which is at least about 80% complementary over its entire length to the equivalent region of the nucleotide sequence of SEQ ID NOs: 1-4 for GPR75, or a fragment of SEQ ID NOs: 1-4, such as about 85%, 86%, 87%, 88%, 89%, 90%, 91%, 92%, 93%, 94%, 95%, 96%, 97%, 98%, or about 99% complementary.

[0164] In other embodiments, the antisense polynucleotides disclosed herein are substantially complementary to the target GPR75 sequence and comprise a contiguous nucleotide sequence which is at least about 80% complementary over its entire length to any one of the sense strand nucleotide sequences in any one of Tables 2, 3, 5, and 6, or a fragment of any one of the sense strand nucleotide sequences in any one of Tables 2, 3, 5, and 6, such as about 85%, 86%, 87%, 88%, 89%, 90%, 91%, 92%, 93%, 94%, 95%, 96%, 97%, 98%, or about 99% complementary.

[0165] In one embodiment, an RNAi agent of the disclosure includes a sense strand that is substantially complementary to an antisense polynucleotide which, in turn, is the same as a target GPR75 sequence, and wherein the sense strand polynucleotide comprises a contiguous nucleotide sequence which is at least about 80% complementary over its entire length to the equivalent region of the nucleotide sequence of SEQ ID NOs: 5-8, or a fragment of any one of SEQ ID NOs: 5-8, such as about 86%, 87%, 88%, 89%, 90%, 91%, 92%, 93%, 94%, 95%, 96%, 97%, 98%, or about 99% complementary.

[0166] In some embodiments, an iRNA of the invention includes a sense strand that is substantially complementary to an antisense polynucleotide which, in turn, is complementary to a target GPR75 sequence, and wherein the sense strand polynucleotide comprises a contiguous nucleotide sequence which is at least about 80% complementary over its entire length to any one of the antisense strand nucleotide sequences in any one of any one of Tables 2, 3, 5, and 6, or a fragment of any one of the antisense strand nucleotide sequences in any one of Tables 2, 3, 5, and 6, such as about 86%, 87%, 88%, 89%, 90%, 91%, 92%, 93%, 94%, 95%, 96%, 97%, 98%, or about 99% complementary.

[0167] In some embodiments, the antisense polynucleotides disclosed herein are substantially complementary to a fragment of a target GPR75 sequence and comprise a contiguous nucleotide sequence which is at least 80% complementary over its entire length to a fragment of SEQ ID NO: 1 selected from the group of nucleotides 38-60; 50-72; 148-181; 153-181; 153-175; 159-181; 228-250; 240-262; 341-363; 341-368; 346-368; 369-396; 369-391; 374-396; 388-410; 414-436; 424-461; 424-446; 424-451; 434-456; 439-461; 429-451; 457-504; 462-504; 462-491; 482-504; 469-491; 457-479; 462-584; 475-497; 469-491; 509-537; 509-531; 515-537; 544-576; 544-566; 549-571; 580-607; 580-602; 585-607; 595-617; 615-647; 615-637; 620-642; 620-647; 625-647; 773-806; 773-795; 773-795; 778-800; 784-806; 837-872; 837-859; 843-872; 843-865; 850-872; 860-882; 889-911; 900-936; 900-922; 908-936; 908-930; 914-936; 938-990; 938-960; 943-965; 968-990; 1060-1101; 1060-1082; 1066-1088; 1073-1095; 1079-1101; 1097-1119; 1238-1260; 1268-1290; 1284-1393; 1284-1306; 1292-1393; 1292-1314; 1292-1383; 1292-1314; 1301-1323; 1307-1383; 1307-1342; 1307-1329; 1313-1335; 1371-1393; 1351-1373; 1320-1342; 1336-1358; 1345-1367; 1351-1373; 1361-1383; 1366-1388; 1393-1415; 1422-1463; 1422-1444; 1441-1463; 1487-1526; 1487-1509; 1493-1526; 1493-1515; 1498-1520; 1504-1526; 1515-1571; 1515-1557; 1515-1543; 1515-1537; 1521-1543; 1530-1552; 1535-1557; 1540-1562; 1549-1571; 1559-1586; 1559-1581; 1564-1586; 1583-1629; 1583-1605; 1588-1610; 1595-1617; 1600-1629; 1600-1622; 1607-1629; 1624-1646; 1635-1657; 1672-1721; 1672-1710; 1677-1699; 1699-1721; 1672-1699; 1688-1710; 1672-1694; 1683-1705; 1693-1714; 1732-1754; 1744-1798; 1751-1773; 1758-1780; 1767-1789; 1776-1798; 1790-1818; 1790-1812; 1796-1818; 1808-1856; 1808-1848; 1808-1836; 1808-1830; 1826-1848; 1814-1836; 1819-1841; 1834-1856; 1877-2082; 1877-1899; 1882-2082; 1882-1925; 1882-1963; 1882-1904; 1887-1693; 1887-1909; 1898-1920; 1903-1925; 1908-1930; 1913-1935; 1913-1950; 1921-1950; 1921-1943; 1928-1950; 1933-1955; 1941-1963; 1946-1968; 1953-1985; 1953-2082; 1953-1975; 1938-1985; 1958-1980; 1963-1985; 1968-1990; 1974-1996; 1974-2065; 1974-2082; 1974-2002; 1980-2002; 1985-2007; 1990-2012; 1990-2033; 1999-2021; 2005-2033; 2005-2027; 2011-2033; 2017-2039; 2025-2055; 2025-2047; 2033-2055; 2038-2060; 2043-2065; 2033-2055; 2048-2070; 2054-2082; 2054-2076; and 2060-2082 of SEQ ID NO: 1, such as about 85%, about 90%, about 91%, about 92%, about 93%, about 94%, about 95%, about 96%, about 97%, about 98%, or about 99% complementary.

[0168] In some embodiments, the double-stranded region of a double-stranded iRNA agent is equal to or at least, 10, 11, 12, 13, 14, 15, 16, 17, 18, 19, 20, 21, 22, 23, 23, 24, 25, 26, 27, 28, 29, 30 or more nucleotide pairs in length.

[0169] In some embodiments, the antisense strand of a double-stranded iRNA agent is equal to or at least 14, 15, 16, 17, 18, 19, 20, 21, 22, 23, 23, 24, 25, 26, 27, 28, 29, or 30 nucleotides in length.

[0170] In some embodiments, the sense strand of a double-stranded iRNA agent is equal to or at least 10, 11, 12, 13, 14, 15, 16, 17, 18, 19, 20, 21, 22, 23, 23, 24, 25, 26, 27, 28, 29, or 30 nucleotides in length.

[0171] In one embodiment, the sense and antisense strands of the double-stranded iRNA agent are each independently 15 to 30 nucleotides in length.

[0172] In one embodiment, the sense and antisense strands of the double-stranded iRNA agent are each independently 19 to 25 nucleotides in length.

[0173] In one embodiment, the sense and antisense strands of the double-stranded iRNA agent are each independently 21 to 23 nucleotides in length.

[0174] In one embodiment, the sense strand of the iRNA agent is 21-nucleotides in length, and the antisense strand is 23-nucleotides in length, wherein the strands form a double-stranded region of 21 consecutive base pairs having a 2-nucleotide long single stranded overhangs at the 3′-end.

[0175] In one aspect of the invention, an agent for use in the methods and compositions of the invention is a single-stranded antisense nucleic acid molecule that inhibits a target mRNA via an antisense inhibition mechanism. The single-stranded antisense RNA molecule is complementary to a sequence within the target mRNA. The single-stranded antisense oligonucleotides can inhibit translation in a stoichiometric manner by base pairing to the mRNA and physically obstructing the translation machinery, see Dias, N. et al., (2002) Mol Cancer Ther 1:347-355. The single-stranded antisense RNA molecule may be about 15 to about 30 nucleotides in length and have a sequence that is complementary to a target sequence. For example, the single-stranded antisense RNA molecule may comprise a sequence that is at least about 15, 16, 17, 18, 19, 20, or more contiguous nucleotides from any one of the antisense sequences described herein.

[0176] In one embodiment, at least partial suppression of the expression of a GPR75 gene, is assessed by a reduction of the amount of GPR75 mRNA which can be isolated from or detected in a first cell or group of cells in which a GPR75 gene is transcribed and which has or have been treated such that the expression of a GPR75 gene is inhibited, as compared to a second cell or group of cells substantially identical to the first cell or group of cells but which has or have not been so treated (control cells). The degree of inhibition may be expressed in terms of:

$$\frac{( mRNA in control cells ) - ( mRNA in treated cells )}{( mRNA in control cells )} •100 \%$$

[0177] In one embodiment, inhibition of expression is determined by the dual luciferase method wherein the RNAi agent is present at 10 nM.

[0178] The phrase “contacting a cell with an RNAi agent,” such as a dsRNA, as used herein, includes contacting a cell by any possible means. Contacting a cell with an RNAi agent includes contacting a cell in vitro with the RNAi agent or contacting a cell in vivo with the RNAi agent. The contacting may be done directly or indirectly. Thus, for example, the RNAi agent may be put into physical contact with the cell by the individual performing the method, or alternatively, the RNAi agent may be put into a situation that will permit or cause it to subsequently come into contact with the cell.

[0179] Contacting a cell in vitro may be done, for example, by incubating the cell with the RNAi agent. Contacting a cell in vivo may be done, for example, by injecting the RNAi agent into or near the tissue where the cell is located, or by injecting the RNAi agent into another area, e.g., the central nervous system (CNS), optionally via intrathecal, intravitreal or other injection, or to the bloodstream or the subcutaneous space, such that the agent will subsequently reach the tissue where the cell to be contacted is located. For example, the RNAi agent may contain or be coupled to a ligand, e.g., a lipophilic moiety or moieties as described below and further detailed, e.g., in PCT/US2019/031170, which is incorporated herein by reference, that directs or otherwise stabilizes the RNAi agent at a site of interest, e.g., the CNS. In some embodiments, the RNAi agent may contain or be coupled to a ligand, e.g., one or more GalNAc derivatives as described below, that directs or otherwise stabilizes the RNAi agent at a site of interest, e.g., the liver. In other embodiments, the RNAi agent may contain or be coupled to a lipophilic moiety or moieties and one or more GalNAc derivatives. Combinations of in vitro and in vivo methods of contacting are also possible. For example, a cell may also be contacted in vitro with an RNAi agent and subsequently transplanted into a subject.

[0180] In one embodiment, contacting a cell with an RNAi agent includes “introducing” or “delivering the RNAi agent into the cell” by facilitating or effecting uptake or absorption into the cell. Absorption or uptake of a RNAi agent can occur through unaided diffusive or active cellular processes, or by auxiliary agents or devices. Introducing a RNAi agent into a cell may be in vitro or in vivo. For example, for in vivo introduction, a RNAi agent can be injected into a tissue site or administered systemically. In vitro introduction into a cell includes methods known in the art such as electroporation and lipofection. Further approaches are described herein below or are known in the art.

[0181] The term “lipophile” or “lipophilic moiety” broadly refers to any compound or chemical moiety having an affinity for lipids. One way to characterize the lipophilicity of the lipophilic moiety is by the octanol-water partition coefficient, logK_{ow}, where K_{ow}, is the ratio of a chemical's concentration in the octanol-phase to its concentration in the aqueous phase of a two-phase system at equilibrium. The octanol-water partition coefficient is a laboratory-measured property of a substance. However, it may also be predicted by using coefficients attributed to the structural components of a chemical which are calculated using first-principle or empirical methods (see, for example, Tetko et al., J. Chem. Inf. Comput. Sci. 41:1407-21 (2001), which is incorporated herein by reference in its entirety). It provides a thermodynamic measure of the tendency of the substance to prefer a non-aqueous or oily milieu rather than water (i.e. its hydrophilic/lipophilic balance). In principle, a chemical substance is lipophilic in character when its logK_{ow} exceeds 0. Typically, the lipophilic moiety possesses a logK_{ow} exceeding 1, exceeding 1.5, exceeding 2, exceeding 3, exceeding 4, exceeding 5, or exceeding 10. For instance, the logK_{ow} of 6-amino hexanol, for instance, is predicted to be approximately 0.7. Using the same method, the logK_{ow} of cholesteryl N-(hexan-6-ol) carbamate is predicted to be 10.7.

[0182] The lipophilicity of a molecule can change with respect to the functional group it carries. For instance, adding a hydroxyl group or amine group to the end of a lipophilic moiety can increase or decrease the partition coefficient (e.g., logK_{ow}) value of the lipophilic moiety.

[0183] Alternatively, the hydrophobicity of the double-stranded RNAi agent, conjugated to one or more lipophilic moieties, can be measured by its protein binding characteristics. For instance, in certain embodiments, the unbound fraction in the plasma protein binding assay of the double-stranded RNAi agent could be determined to positively correlate to the relative hydrophobicity of the double-stranded RNAi agent, which could then positively correlate to the silencing activity of the double-stranded RNAi agent.

[0184] In one embodiment, the plasma protein binding assay determined is an electrophoretic mobility shift assay (EMSA) using human serum albumin protein. An exemplary protocol of this binding assay is illustrated in detail in, e.g., PCT Publication No. WO 2019/217459. The hydrophobicity of the double-stranded RNAi agent, measured by fraction of unbound siRNA in the binding assay, exceeds 0.15, exceeds 0.2, exceeds 0.25, exceeds 0.3, exceeds 0.35, exceeds 0.4, exceeds 0.45, or exceeds 0.5 for an enhanced in vivo delivery of siRNA.

[0185] Accordingly, conjugating the lipophilic moieties to the internal position(s) of the double-stranded RNAi agent provides optimal hydrophobicity for the enhanced in vivo delivery of siRNA.

[0186] The term “lipid nanoparticle” or “LNP” is a vesicle comprising a lipid layer encapsulating a pharmaceutically active molecule, such as a nucleic acid molecule, e.g., a RNAi agent or a plasmid from which a RNAi agent is transcribed. LNPs are described in, for example, U.S. Pat. Nos. 6,858,225, 6,815,432, 8,158,601, and 8,058,069, the entire contents of which are hereby incorporated herein by reference.

[0187] As used herein, a “subject” is an animal, such as a mammal, including a primate (such as a human, a non-human primate, e.g., a monkey, and a chimpanzee), or a non-primate (such as a cow, a pig, a horse, a goat, a rabbit, a sheep, a hamster, a guinea pig, a cat, a dog, a rat, or a mouse), or a bird that expresses the target gene, either endogenously or heterologously. In one embodiment, the subject is a human, such as a human being treated or assessed for a disease, disorder, or condition that would benefit from reduction in GPR75 expression; a human at risk for a disease, disorder, or condition that would benefit from reduction in GPR75 expression; a human having a disease, disorder, or condition that would benefit from reduction in GPR75 expression; or human being treated for a disease, disorder, or condition that would benefit from reduction in GPR75 expression as described herein. In some embodiments, the subject is a female human. In other embodiments, the subject is a male human. In one embodiment, the subject is an adult subject. In another embodiment, the subject is a pediatric subject.

[0188] As used herein, the terms “treating” or “treatment” refer to a beneficial or desired result including, but not limited to, alleviation or amelioration of one or more signs or symptoms associated with GPR75 expression or GPR75 protein production, e.g., a GPR75-associated disease, e.g., obesity, or symptoms associated with unwanted GPR75 expression; diminishing the extent of unwanted GPR75 activation or stabilization; amelioration or palliation of unwanted GPR75 activation or stabilization. “Treatment” can also mean prolonging survival as compared to expected survival in the absence of treatment.

[0189] The term “lower” in the context of the level of GPR75 in a subject or a disease marker or symptom refers to a statistically significant decrease in such level. The decrease can be, for example, at least 10%, 15%, 20%, 25%, 30%, %, 40%, 45%, 50%, 55%, 60%, 65%, 70%, 75%, 80%, 85%, 90%, 95%, or more. In certain embodiments, a decrease is at least 20%. In certain embodiments, the decrease is at least 50% in a disease marker, e.g., protein or gene expression level. “Lower” in the context of the level of GPR75 in a subject is a decrease to a level accepted as within the range of normal for an individual without such disorder. In certain embodiments, the expression of the target is normalized, i.e., decreased towards or to a level accepted as within the range of normal for an individual without such disorder, e.g., BMI, blood glucose level, blood lipid level, blood oxygen level, white blood cell count, kidney function, spleen function, liver function. As used here, “lower” in a subject can refer to lowering of gene expression or protein production in a cell in a subject does not require lowering of expression in all cells or tissues of a subject. For example, as used herein, lowering in a subject can include lowering of gene expression or protein production in a subject.

[0190] The term “lower” can also be used in association with normalizing a symptom of a disease or condition, i.e. decreasing the difference between a level in a subject suffering from a GPR75-associated disease towards or to a level in a normal subject not suffering from a GPR75-associated disease. As used herein, if a disease is associated with an elevated value for a symptom, “normal” is considered to be the upper limit of normal. If a disease is associated with a decreased value for a symptom, “normal” is considered to be the lower limit of normal.

[0191] As used herein, “prevention” or “preventing,” when used in reference to a disease, disorder, or condition thereof, that would benefit from a reduction in expression of a GPR75 gene or production of a GPR75 protein, refers to a reduction in the likelihood that a subject will develop a symptom associated with such a disease, disorder, or condition, e.g., a symptom of a GPR75-associated disease, e.g., a body weight disorder, such as obesity, e.g., diabetes, or lipid metabolism disorders. The failure to develop a disease, disorder, or condition, or the reduction in the development of a symptom associated with such a disease, disorder, or condition (e.g., by at least about 10% on a clinically accepted scale for that disease or disorder), or the exhibition of delayed symptoms delayed (e.g., by days, weeks, months or years) is considered effective prevention.

[0192] As used herein, the term “GPR75-associated disease,” is a disease or disorder that would benefit from reduction in the expression or activity of GPR75. The term “GPR75-associated disease,” is a disease or disorder that is caused by, or associated with, GPR75 expression or GPR75 protein production. The term “GPR75-associated disease” includes a disease, disorder or condition that would benefit from a decrease in GPR75 expression or GPR75 protein activity. Non-limiting examples of GPR75-associated diseases include, for example, body weight disorders, such as obesity.

[0193] As used herein, a “body weight disorder” is a disorder associated with abnormal or excess fat accumulation and body weight. Such disorders may include obesity, metabolic syndrome including independent components of metabolic syndrome (e.g., central obesity, FBG/pre-diabetes/diabetes, hypercholesterolemia, hypertriglyceridemia, and hypertension), hypo-metabolic states, hypothyroidism, uremia, and other conditions associated with weight gain (including rapid weight gain), maintenance of weight loss, or risk of weight regain following weight loss.

[0194] Body weight may be assessed by the body mass index (BMI), a person's weight (in kilograms) divided by the square of his or her height (in metres). A BMI is less than about 18.5 indicates the subject is underweight; a BMI of about 18.5 to about <25 indicates the subject has a normal weight; a BMI of about 25.0 to about <30 indicates the subject is overweight, and a BMI of about 30.0 or higher indicates the subject is obese.

[0195] Additional diseases or conditions related to body weight disorders that would be apparent to the skilled artisan and are within the scope of this disclosure.

[0196] The symptoms for a GPR75-associated disease, e.g., a body weight disorder, such as obesity, include, for example, an excess of fat mass, a BMI of about 25 or higher, an increase in body mass index, a lower metabolic rate, central obesity, FBG/pre-diabetes/diabetes, hypercholesterolemia, hypertriglyceridemia, and hypertension, insulin resistance, lack of ability to regulate blood sugar, high blood glucose levels, diabetes, and/or excess weight gain. Further details regarding signs and symptoms of the various diseases or conditions are provided herein and are well known in the art.

[0197] “Therapeutically effective amount,” as used herein, is intended to include the amount of an RNAi agent that, when administered to a subject having a GPR75-associated disease, is sufficient to effect treatment of the disease (e.g., by diminishing, ameliorating, or maintaining the existing disease or one or more symptoms of disease). The “therapeutically effective amount” may vary depending on the RNAi agent, how the agent is administered, the disease and its severity and the history, age, weight, family history, genetic makeup, the types of preceding or concomitant treatments, if any, and other individual characteristics of the subject to be treated.

[0198] “Prophylactically effective amount,” as used herein, is intended to include the amount of a RNAi agent that, when administered to a subject having a GPR75-associated disorder, e.g., a body weight disorder, e.g., obesity, is sufficient to prevent or ameliorate the disease or one or more symptoms of the disease. Ameliorating the disease includes slowing the course of the disease or reducing the severity of later-developing disease. The “prophylactically effective amount” may vary depending on the RNAi agent, how the agent is administered, the degree of risk of disease, and the history, age, weight, family history, genetic makeup, the types of preceding or concomitant treatments, if any, and other individual characteristics of the patient to be treated.

[0199] A “therapeutically-effective amount” or “prophylactically effective amount” also includes an amount of a RNAi agent that produces some desired local or systemic effect at a reasonable benefit/risk ratio applicable to any treatment. A RNAi agent employed in the methods of the present disclosure may be administered in a sufficient amount to produce a reasonable benefit/risk ratio applicable to such treatment.

[0200] The phrase “pharmaceutically acceptable” is employed herein to refer to those compounds, materials, compositions, or dosage forms which are, within the scope of sound medical judgment, suitable for use in contact with the tissues of human subjects and animal subjects without excessive toxicity, irritation, allergic response, or other problem or complication, commensurate with a reasonable benefit/risk ratio.

[0201] The phrase “pharmaceutically-acceptable carrier” as used herein means a pharmaceutically-acceptable material, composition or vehicle, such as a liquid or solid filler, diluent, excipient, manufacturing aid (e.g., lubricant, talc magnesium, calcium or zinc stearate, or steric acid), or solvent encapsulating material, involved in carrying or transporting the subject compound from one organ, or portion of the body, to another organ, or portion of the body. Each carrier must be “acceptable” in the sense of being compatible with the other ingredients of the formulation and not injurious to the subject being treated. Some examples of materials which can serve as pharmaceutically-acceptable carriers include: (1) sugars, such as lactose, glucose and sucrose; (2) starches, such as corn starch and potato starch; (3) cellulose, and its derivatives, such as sodium carboxymethyl cellulose, ethyl cellulose and cellulose acetate; (4) powdered tragacanth; (5) malt; (6) gelatin; (7) lubricating agents, such as magnesium state, sodium lauryl sulfate and talc; (8) excipients, such as cocoa butter and suppository waxes; (9) oils, such as peanut oil, cottonseed oil, safflower oil, sesame oil, olive oil, corn oil and soybean oil; (10) glycols, such as propylene glycol; (11) polyols, such as glycerin, sorbitol, mannitol and polyethylene glycol; (12) esters, such as ethyl oleate and ethyl laurate; (13) agar; (14) buffering agents, such as magnesium hydroxide and aluminum hydroxide; (15) alginic acid; (16) pyrogen-free water; (17) isotonic saline; (18) Ringer's solution; (19) ethyl alcohol; (20) pH buffered solutions; (21) polyesters, polycarbonates or polyanhydrides; (22) bulking agents, such as polypeptides and amino acids (23) serum component, such as serum albumin, HDL and LDL; and (22) other non-toxic compatible substances employed in pharmaceutical formulations. Pharmaceutically acceptable carriers for pulmonary delivery are known in the art and will vary depending on the desired location for deposition of the agent, e.g., upper or lower respiratory system, and the type of device to be used for delivery, e.g., sprayer, nebulizer, dry powder inhaler.

[0202] The term “sample,” as used herein, includes a collection of similar fluids, cells, or tissues isolated from a subject, as well as fluids, cells, or tissues present within a subject. Examples of biological fluids include blood, serum and serosal fluids, plasma, bronchial fluids, sputum, cerebrospinal fluid, ocular fluids, lymph, urine, saliva, sputum, and the like. Tissue samples may include samples from tissues, organs or localized regions. For example, samples may be derived from particular organs, parts of organs, or fluids or cells within those organs. In certain embodiments, samples may be derived from the brain (e.g., whole brain or certain segments of brain, e.g., striatum, or certain types of cells in the brain, such as, e.g., neurons and glial cells (astrocytes, oligodendrocytes, microglial cells)). In other embodiments, a “sample derived from a subject” refers to liver tissue (or subcomponents thereof) derived from the subject. In some embodiments, a “sample derived from a subject” refers to blood drawn from the subject or plasma or serum derived therefrom. In further embodiments, a “sample derived from a subject” refers to brain tissue (or subcomponents thereof) or retinal tissue (or subcomponents thereof) derived from the subject.

### II. RNAi Agents of the Disclosure

[0203] Described herein are RNAi agents which inhibit the expression of a GPR75 gene. In one embodiment, the RNAi agent includes double stranded ribonucleic acid (dsRNA) molecules for inhibiting the expression of a GPR75 gene in a cell, such as a cell within a subject, e.g., a mammal, such as a human, e.g., a subject having a GPR75-associated disorder, e.g., a body weight, e.g., obesity, or a subject at risk of a GPR75-associated disease.

[0204] The dsRNA includes an antisense strand having a region of complementarity which is complementary to at least a part of a target RNA, e.g., an mRNA formed in the expression of a GPR75 gene. The region of complementarity is about 15-30 nucleotides or less in length. Upon contact with a cell expressing the GPR75 gene, the RNAi agent inhibits the expression of the GPR75 gene (e.g., a human gene, a primate gene, a non-primate gene) by at least 50% as assayed by, for example, a PCR or branched DNA (bDNA)-based method, or by a protein-based method, such as by immunofluorescence analysis, using, for example, western blotting or flowcytometric techniques. In certain embodiments, inhibition of expression is by at least 50% as assayed by the Dual-Glo lucifierase assay in Example 1 where the siRNA is at a 10 nM concentration.

[0205] A dsRNA includes two RNA strands that are complementary and hybridize to form a duplex structure under conditions in which the dsRNA will be used. One strand of a dsRNA (the antisense strand) includes a region of complementarity that is substantially complementary, and generally fully complementary, to a target sequence. For example, the target sequence can be derived from the sequence of an mRNA formed during the expression of a GPR75 gene. The other strand (the sense strand) includes a region that is complementary to the antisense strand, such that the two strands hybridize and form a duplex structure when combined under suitable conditions. As described elsewhere herein and as known in the art, the complementary sequences of a dsRNA can also be contained as self-complementary regions of a single nucleic acid molecule, as opposed to being on separate oligonucleotides.

[0206] Generally, the duplex structure is 15 to 30 base pairs in length, e.g., 15-29, 15-28, 15-27, 15-26, 15-25, 15-24, 15-23, 15-22, 15-21, 15-20, 15-19, 15-18, 15-17, 18-30, 18-29, 18-28, 18-27, 18-26, 18-25, 18-24, 18-23, 18-22, 18-21, 18-20, 19-30, 19-29, 19-28, 19-27, 19-26, 19-25, 19-24, 19-23, 19-22, 19-21, 19-20, 20-30, 20-29, 20-28, 20-27, 20-26, 20-25, 20-24,20-23, 20-22, 20-21, 21-30, 21-29, 21-28, 21-27, 21-26, 21-25, 21-24, 21-23, or 21-22 base pairs in length. In certain embodiments, the duplex structure is 18 to 25 base pairs in length, e.g., 18-25, 18-24, 18-23, 18-22, 18-21, 18-20, 19-25, 19-24, 19-23, 19-22, 19-21, 19-20, 20-25, 20-24,20-23, 20-22, 20-21, 21-25, 21-24, 21-23, 21-22, 22-25, 22-24, 22-23, 23-25, 23-24 or 24-25 base pairs in length, for example, 19-21 basepairs in length. Ranges and lengths intermediate to the above recited ranges and lengths are also contemplated to be part of the disclosure.

[0207] Similarly, the region of complementarity to the target sequence is 15 to 30 nucleotides in length, e.g., 15-29, 15-28, 15-27, 15-26, 15-25, 15-24, 15-23, 15-22, 15-21, 15-20, 15-19, 15-18, 15-17, 18-30, 18-29, 18-28, 18-27, 18-26, 18-25, 18-24, 18-23, 18-22, 18-21, 18-20, 19-30, 19-29, 19-28, 19-27, 19-26, 19-25, 19-24, 19-23, 19-22, 19-21, 19-20, 20-30, 20-29, 20-28, 20-27, 20-26, 20-25, 20-24,20-23, 20-22, 20-21, 21-30, 21-29, 21-28, 21-27, 21-26, 21-25, 21-24, 21-23, or 21-22 nucleotides in length, for example 19-23 nucleotides in length or 21-23 nucleotides in length. Ranges and lengths intermediate to the above recited ranges and lengths are also contemplated to be part of the disclosure.

[0208] In some embodiments, the dsRNA is 15 to 23 nucleotides in length, or 25 to 30 nucleotides in length. In general, the dsRNA is long enough to serve as a substrate for the Dicer enzyme. For example, it is well known in the art that dsRNAs longer than about 21-23 nucleotides can serve as substrates for Dicer. As the ordinarily skilled person will also recognize, the region of an RNA targeted for cleavage will most often be part of a larger RNA molecule, often an mRNA molecule. Where relevant, a “part” of an mRNA target is a contiguous sequence of an mRNA target of sufficient length to allow it to be a substrate for RNAi-directed cleavage (i.e., cleavage through a RISC pathway).

[0209] One of skill in the art will also recognize that the duplex region is a primary functional portion of a dsRNA, e.g., a duplex region of about 15 to 36 base pairs, e.g., 15-36, 15-35, 15-34, 15-33, 15-32, 15-31, 15-30, 15-29, 15-28, 15-27, 15-26, 15-25, 15-24, 15-23, 15-22, 15-21, 15-20, 15-19, 15-18, 15-17, 18-30, 18-29, 18-28, 18-27, 18-26, 18-25, 18-24, 18-23, 18-22, 18-21, 18-20, 19-30, 19-29, 19-28, 19-27, 19-26, 19-25, 19-24, 19-23, 19-22, 19-21, 19-20, 20-30, 20-29, 20-28, 20-27, 20-26, 20-25, 20-24,20-23, 20-22, 20-21, 21-30, 21-29, 21-28, 21-27, 21-26, 21-25, 21-24, 21-23, or 21-22 base pairs, for example, 19-21 base pairs. Thus, in one embodiment, to the extent that it becomes processed to a functional duplex, of e.g., 15-30 base pairs, that targets a desired RNA for cleavage, an RNA molecule or complex of RNA molecules having a duplex region greater than 30 base pairs is a dsRNA. Thus, an ordinarily skilled artisan will recognize that in one embodiment, a miRNA is a dsRNA. In another embodiment, a dsRNA is not a naturally occurring miRNA. In another embodiment, a RNAi agent useful to target GPR75 expression is not generated in the target cell by cleavage of a larger dsRNA.

[0210] A dsRNA as described herein can further include one or more single-stranded nucleotide overhangs e.g., 1, 2, 3, or 4 nucleotides. A nucleotide overhang can comprise or consist of a nucleotide/nucleoside analog, including a deoxynucleotide/nucleoside. The overhang(s) can be on the sense strand, the antisense strand or any combination thereof. Furthermore, the nucleotide(s) of an overhang can be present on the 5′-end, 3′-end or both ends of either an antisense or sense strand of a dsRNA. In certain embodiments, longer, extended overhangs are possible.

[0211] A dsRNA can be synthesized by standard methods known in the art as further discussed below, e.g., by use of an automated DNA synthesizer, such as are commercially available from, for example, Biosearch, Applied Biosystems, Inc. iRNA compounds of the invention may be prepared using a two-step procedure. First, the individual strands of the double stranded RNA molecule are prepared separately. Then, the component strands are annealed. The individual strands of the siRNA compound can be prepared using solution-phase or solid-phase organic synthesis or both. Organic synthesis offers the advantage that the oligonucleotide strands comprising unnatural or modified nucleotides can be easily prepared. Single-stranded oligonucleotides of the invention can be prepared using solution-phase or solid-phase organic synthesis or both.

[0212] An siRNA can be produced, e.g., in bulk, by a variety of methods. Exemplary methods include: organic synthesis and RNA cleavage, e.g., in vitro cleavage.

[0213] An siRNA can be made by separately synthesizing a single stranded RNA molecule, or each respective strand of a double-stranded RNA molecule, after which the component strands can then be annealed.

[0214] A large bioreactor, e.g., the OligoPilot II from Pharmacia Biotec AB (Uppsala Sweden), can be used to produce a large amount of a particular RNA strand for a given siRNA. The OligoPilotII reactor can efficiently couple a nucleotide using only a 1.5 molar excess of a phosphoramidite nucleotide. To make an RNA strand, ribonucleotides amidites are used. Standard cycles of monomer addition can be used to synthesize the 21 to 23 nucleotide strand for the siRNA. Typically, the two complementary strands are produced separately and then annealed, e.g., after release from the solid support and deprotection.

[0215] Organic synthesis can be used to produce a discrete siRNA species. The complementary of the species to a GPR75 gene can be precisely specified. For example, the species may be complementary to a region that includes a polymorphism, e.g., a single nucleotide polymorphism. Further the location of the polymorphism can be precisely defined. In some embodiments, the polymorphism is located in an internal region, e.g., at least 4, 5, 7, or 9 nucleotides from one or both of the termini.

[0216] In one embodiment, RNA generated is carefully purified to remove endsiRNA is cleaved in vitro into siRNAs, for example, using a Dicer or comparable RNAse III-based activity. For example, the dsiRNA can be incubated in an in vitro extract from Drosophila or using purified components, e.g., a purified RNAse or RISC complex (RNA-induced silencing complex). See, e.g., Ketting et al. Genes Dev 2001 Oct. 15; 15(20):2654-9 and Hammond Science 2001 Aug. 10; 293(5532):1146-50.

[0217] dsiRNA cleavage generally produces a plurality of siRNA species, each being a particular 21 to 23 nucleotide fragment of a source dsiRNA molecule. For example, siRNAs that include sequences complementary to overlapping regions and adjacent regions of a source dsiRNA molecule may be present.

[0218] Regardless of the method of synthesis, the siRNA preparation can be prepared in a solution (e.g., an aqueous or organic solution) that is appropriate for formulation. For example, the siRNA preparation can be precipitated and redissolved in pure double-distilled water, and lyophilized. The dried siRNA can then be resuspended in a solution appropriate for the intended formulation process.

[0219] In one aspect, a dsRNA of the disclosure includes at least two nucleotide sequences, a sense sequence and an antisense sequence. The sense strand sequence for GPR75 may be selected from the group of sequences provided in any one of Tables 2, 3, 5, and 6, and the corresponding nucleotide sequence of the antisense strand of the sense strand may be selected from the group of sequences of any one of Tables 2, 3, 5, and 6. In this aspect, one of the two sequences is complementary to the other of the two sequences, with one of the sequences being substantially complementary to a sequence of an mRNA generated in the expression of a GPR75 gene. As such, in this aspect, a dsRNA will include two oligonucleotides, where one oligonucleotide is described as the sense strand (passenger strand) in any one of Tables 2, 3, 5, and 6, and the second oligonucleotide is described as the corresponding antisense strand (guide strand) of the sense strand in any one of Tables 2, 3, 5, and 6 for GPR75.

[0220] In one embodiment, the substantially complementary sequences of the dsRNA are contained on separate oligonucleotides. In another embodiment, the substantially complementary sequences of the dsRNA are contained on a single oligonucleotide.

[0221] It will be understood that, although the sequences provided herein are described as modified or conjugated sequences, the RNA of the RNAi agent of the disclosure e.g., a dsRNA of the disclosure, may comprise any one of the sequences set forth in any one of Tables 2, 3, 5, and 6 that is un-modified, un-conjugated, or modified or conjugated differently than described therein. One or more lipophilic ligands or one or more GalNAc ligands can be included in any of the positions of the RNAi agents provided in the instant application.

[0222] The skilled person is well aware that dsRNAs having a duplex structure of about 20 to 23 base pairs, e.g., 21, base pairs have been hailed as particularly effective in inducing RNA interference (Elbashir et al., (2001) EMBO J., 20:6877-6888). However, others have found that shorter or longer RNA duplex structures can also be effective (Chu and Rana (2007) RNA 14:1714-1719; Kim et al. (2005) Nat Biotech 23:222-226). In the embodiments described above, by virtue of the nature of the oligonucleotide sequences provided herein, dsRNAs described herein can include at least one strand of a length of minimally 21 nucleotides. It can be reasonably expected that shorter duplexes minus only a few nucleotides on one or both ends can be similarly effective as compared to the dsRNAs described above. Hence, dsRNAs having a sequence of at least 15, 16, 17, 18, 19, 20, or more contiguous nucleotides derived from one of the sequences provided herein, and differing in their ability to inhibit the expression of a GPR75 gene by not more than 10, 15, 20, 25, or 30% inhibition from a dsRNA comprising the full sequence using the in vitro assay with Cos7 and a 10 nM concentration of the RNA agent and the PCR assay as provided in the examples herein, are contemplated to be within the scope of the present disclosure.

[0223] In addition, the RNAs described herein identify a site(s) in a GPR75 transcript that is susceptible to RISC-mediated cleavage. As such, the present disclosure further features RNAi agents that target within this site(s). As used herein, a RNAi agent is said to target within a particular site of an RNA transcript if the RNAi agent promotes cleavage of the transcript anywhere within that particular site. Such a RNAi agent will generally include at least about 15 contiguous nucleotides, such as at least 19 nucleotides, from one of the sequences provided herein coupled to additional nucleotide sequences taken from the region contiguous to the selected sequence in a GPR75 gene.

[0224] An RNAi agent as described herein can contain one or more mismatches to the target sequence. In one embodiment, an RNAi agent as described herein contains no more than 3 mismatches (i.e., 3, 2, 1, or 0 mismatches). In one embodiment, an RNAi agent as described herein contains no more than 2 mismatches. In one embodiment, an RNAi agent as described herein contains no more than 1 mismatch. In one embodiment, an RNAi agent as described herein contains 0 mismatches. In certain embodiments, if the antisense strand of the RNAi agent contains mismatches to the target sequence, the mismatch can optionally be restricted to be within the last 5 nucleotides from either the 5′- or 3′-end of the region of complementarity. For example, in such embodiments, for a 23 nucleotide RNAi agent, the strand which is complementary to a region of a GPR75 gene generally does not contain any mismatch within the central 13 nucleotides. The methods described herein or methods known in the art can be used to determine whether an RNAi agent containing a mismatch to a target sequence is effective in inhibiting the expression of a GPR75 gene. Consideration of the efficacy of RNAi agents with mismatches in inhibiting expression of a GPR75 gene is important, especially if the particular region of complementarity in a GPR75 gene is known to mutate.

### III. Modified RNAi Agents of the Disclosure

[0225] In one embodiment, the RNA of the RNAi agent of the disclosure e.g., a dsRNA, is un-modified, and does not comprise, e.g., chemical modifications or conjugations known in the art and described herein. In some embodiments, the RNA of an RNAi agent of the disclosure, e.g., a dsRNA, is chemically modified to enhance stability or other beneficial characteristics. In certain embodiments of the disclosure, substantially all of the nucleotides of an RNAi agent of the disclosure are modified. In other embodiments of the disclosure, all of the nucleotides of an RNAi agent of the disclosure are modified. RNAi agents of the disclosure in which “substantially all of the nucleotides are modified” are largely but not wholly modified and can include not more than 5, 4, 3, 2, or 1 unmodified nucleotides. In still other embodiments of the disclosure, RNAi agents of the disclosure can include not more than 5, 4, 3, 2 or 1 modified nucleotides.

[0226] The nucleic acids featured in the disclosure can be synthesized or modified by methods well established in the art, such as those described in “Current protocols in nucleic acid chemistry,” Beaucage, S. L. et al. (Edrs.), John Wiley & Sons, Inc., New York, NY, USA, which is hereby incorporated herein by reference. Modifications include, for example, end modifications, e.g., 5′-end modifications (phosphorylation, conjugation, inverted linkages) or 3′-end modifications (conjugation, DNA nucleotides, inverted linkages, etc.); base modifications, e.g., replacement with stabilizing bases, destabilizing bases, or bases that base pair with an expanded repertoire of partners, removal of bases (abasic nucleotides), or conjugated bases; sugar modifications (e.g., at the 2′-position or 4′-position) or replacement of the sugar; or backbone modifications, including modification or replacement of the phosphodiester linkages. Specific examples of RNAi agents useful in the embodiments described herein include, but are not limited to, RNAs containing modified backbones or no natural internucleoside linkages. RNAs having modified backbones include, among others, those that do not have a phosphorus atom in the backbone. For the purposes of this specification, and as sometimes referenced in the art, modified RNAs that do not have a phosphorus atom in their internucleoside backbone can also be considered to be oligonucleosides. In some embodiments, a modified RNAi agent will have a phosphorus atom in its internucleoside backbone.

[0227] Modified RNA backbones include, for example, phosphorothioates, chiral phosphorothioates, phosphorodithioates, phosphotriesters, aminoalkylphosphotriesters, methyl and other alkyl phosphonates including 3′-alkylene phosphonates and chiral phosphonates, phosphinates, phosphoramidates including 3′-amino phosphoramidate and aminoalkylphosphoramidates, thionophosphoramidates, thionoalkylphosphonates, thionoalkylphosphotriesters, and boranophosphates having normal 3′-5′ linkages, 2′-5′-linked analogs of these, and those having inverted polarity wherein the adjacent pairs of nucleoside units are linked 3′-5′ to 5′-3′ or 2′-5′ to 5′-2′. Various salts, e.g., sodium salts, mixed salts and free acid forms are also included.

[0228] Representative U.S. patents that teach the preparation of the above phosphorus-containing linkages include, but are not limited to, U.S. Pat. Nos. 3,687,808; 4,469,863; 4,476,301; 5,023,243; 5,177,195; 5,188,897; 5,264,423; 5,276,019; 5,278,302; 5,286,717; 5,321,131; 5,399,676; 5,405,939; 5,453,496; 5,455,233; 5,466,677; 5,476,925; 5,519,126; 5,536,821; 5,541,316; 5,550,111; 5,563,253; 5,571,799; 5,587,361; 5,625,050; 6,028,188; 6,124,445; 6,160,109; 6,169,170; 6,172,209; 6,239,265; 6,277,603; 6,326,199; 6,346,614; 6,444,423; 6,531,590; 6,534,639; 6,608,035; 6,683,167; 6,858,715; 6,867,294; 6,878,805; 7,015,315; 7,041,816; 7,273,933; 7,321,029; and US Pat RE39464, the entire contents of each of which are hereby incorporated herein by reference.

[0229] Modified RNA backbones that do not include a phosphorus atom therein have backbones that are formed by short chain alkyl or cycloalkyl internucleoside linkages, mixed heteroatoms and alkyl or cycloalkyl internucleoside linkages, or one or more short chain heteroatomic or heterocyclic internucleoside linkages. These include those having morpholino linkages (formed in part from the sugar portion of a nucleoside); siloxane backbones; sulfide, sulfoxide and sulfone backbones; formacetyl and thioformacetyl backbones; methylene formacetyl and thioformacetyl backbones; alkene containing backbones; sulfamate backbones; methyleneimino and methylenehydrazino backbones; sulfonate and sulfonamide backbones; amide backbones; and others having mixed N, O, S and CH₂ component parts.

[0230] Representative U.S. patents that teach the preparation of the above oligonucleosides include, but are not limited to, U.S. Pat. Nos. 5,034,506; 5,166,315; 5,185,444; 5,214,134; 5,216,141; 5,235,033; 5,64,562; 5,264,564; 5,405,938; 5,434,257; 5,466,677; 5,470,967; 5,489,677; 5,541,307; 5,561,225; 5,596,086; 5,602,240; 5,608,046; 5,610,289; 5,618,704; 5,623,070; 5,663,312; 5,633,360; 5,677,437; and 5,677,439, the entire contents of each of which are hereby incorporated herein by reference.

[0231] In other embodiments, suitable RNA mimetics are contemplated for use in RNAi agents, in which both the sugar and the internucleoside linkage, i.e., the backbone, of the nucleotide units are replaced with novel groups. The base units are maintained for hybridization with an appropriate nucleic acid target compound. One such oligomeric compound, an RNA mimetic that has been shown to have excellent hybridization properties, is referred to as a peptide nucleic acid (PNA). In PNA compounds, the sugar backbone of an RNA is replaced with an amide containing backbone, in particular an aminoethylglycine backbone. The nucleobases are retained and are bound directly or indirectly to aza nitrogen atoms of the amide portion of the backbone. Representative U.S. patents that teach the preparation of PNA compounds include, but are not limited to, U.S. Pat. Nos. 5,539,082; 5,714,331; and 5,719,262, the entire contents of each of which are hereby incorporated herein by reference. Additional PNA compounds suitable for use in the RNAi agents of the disclosure are described in, for example, in Nielsen et al., Science, 1991, 254, 1497-1500.

[0232] Some embodiments featured in the disclosure include RNAs with phosphorothioate backbones and oligonucleosides with heteroatom backbones, and in particular —CH₂—NH—CH₂—, —CH₂—N(CH₃)—O—CH₂—[known as a methylene (methylimino) or MMI backbone], —CH₂—O—N(CH₃)—CH₂—, —CH₂—N(CH₃)—N(CH₃)—CH₂— and —N(CH₃)—CH₂—CH₂— of the above-referenced U.S. Pat. No. 5,489,677, and the amide backbones of the above-referenced U.S. Pat. No. 5,602,240. In some embodiments, the RNAs featured herein have morpholino backbone structures of the above-referenced U.S. Pat. No. 5,034,506. The native phosphodiester backbone can be represented as O—P(O)(OH)—OCH2-.

[0233] Modified RNAs can also contain one or more substituted sugar moieties. The RNAi agents, e.g., dsRNAs, featured herein can include one of the following at the 2′-position: OH; F; O-, S-, or N-alkyl; O-, S-, or N-alkenyl; O—, S- or N-alkynyl; or O-alkyl-O-alkyl, wherein the alkyl, alkenyl and alkynyl can be substituted or unsubstituted C₁ to C₁₀ alkyl or C₂ to C₁₀ alkenyl and alkynyl. Exemplary suitable modifications include O[(CH₂)ₙO]ₘCH₃, O(CH₂)ₙOCH₃, O(CH₂)ₙNH₂, O(CH₂)ₙCH₃, O(CH₂)ₙONH₂, and O(CH₂)ₙON[(CH₂)ₙCH₃)]₂, where n and m are from 1 to about 10. In other embodiments, dsRNAs include one of the following at the 2′ position: C₁ to C₁₀ lower alkyl, substituted lower alkyl, alkaryl, aralkyl, O-alkaryl or O-aralkyl, SH, SCH₃, OCN, Cl, Br, CN, CF₃, OCF₃, SOCH₃, SO₂CH₃, ONO₂, NO₂, N₃, NH₂, heterocycloalkyl, heterocycloalkaryl, aminoalkylamino, polyalkylamino, substituted silyl, an RNA cleaving group, a reporter group, an intercalator, a group for improving the pharmacokinetic properties of a RNAi agent, or a group for improving the pharmacodynamic properties of a RNAi agent, and other substituents having similar properties. In some embodiments, the modification includes a 2′-methoxyethoxy (2′-O—CH₂CH₂OCH₃, also known as 2′-O-(2-methoxyethyl) or 2′-MOE) (Martin et al., Helv. Chim. Acta, 1995, 78:486-504) i.e., an alkoxy-alkoxy group. Another exemplary modification is 2′-dimethylaminooxyethoxy, i.e., a O(CH₂)₂ON(CH₃)₂ group, also known as 2′-DMAOE, as described in examples herein below, and 2′-dimethylaminoethoxyethoxy (also known in the art as 2′-O-dimethylaminoethoxyethyl or 2′-DMAEOE), i.e., 2′-O—CH₂—O—CH₂—N(CH₃)₂. Further exemplary modifications include: 5′-Me-2′-F nucleotides, 5′-Me-2′-OMe nucleotides, 5′-Me-2′-deoxynucleotides, (both R and S isomers in these three families); 2′-alkoxyalkyl; and 2′-NMA (N-methylacetamide).

[0234] Other modifications include 2′-methoxy (2′-OCH₃), 2′-aminopropoxy (2′-OCH₂CH₂CH₂NH₂), 2′-O-hexadecyl, and 2′-fluoro (2′-F). Similar modifications can also be made at other positions on the RNA of a RNAi agent, particularly the 3′ position of the sugar on the 3′ terminal nucleotide or in 2′-5′ linked dsRNAs and the 5′ position of 5′ terminal nucleotide. RNAi agents can also have sugar mimetics such as cyclobutyl moieties in place of the pentofuranosyl sugar. Representative U.S. patents that teach the preparation of such modified sugar structures include, but are not limited to, U.S. Pat. Nos. 4,981,957; 5,118,800; 5,319,080; 5,359,044; 5,393,878; 5,446,137; 5,466,786; 5,514,785; 5,519,134; 5,567,811; 5,576,427; 5,591,722; 5,597,909; 5,610,300; 5,627,053; 5,639,873; 5,646,265; 5,658,873; 5,670,633; and 5,700,920, certain of which are commonly owned with the instant application. The entire contents of each of the foregoing are hereby incorporated herein by reference.

[0235] An RNAi agent of the disclosure can also include nucleobase (often referred to in the art simply as “base”) modifications or substitutions. As used herein, “unmodified” or “natural” nucleobases include the purine bases adenine (A) and guanine (G), and the pyrimidine bases thymine (T), cytosine (C) and uracil (U). Modified nucleobases include other synthetic and natural nucleobases such as 5-methylcytosine (5-me-C), 5-hydroxymethyl cytosine, xanthine, hypoxanthine, 2-aminoadenine, 6-methyl and other alkyl derivatives of adenine and guanine, 2-propyl and other alkyl derivatives of adenine and guanine, 2-thiouracil, 2-thiothymine and 2-thiocytosine, 5-halouracil and cytosine, 5-propynyl uracil and cytosine, 6-azo uracil, cytosine and thymine, 5-uracil (pseudouracil), 4-thiouracil, 8-halo, 8-amino, 8-thiol, 8-thioalkyl, 8-hydroxyl anal other 8-substituted adenines and guanines, 5-halo, particularly 5-bromo, 5-trifluoromethyl and other 5-substituted uracils and cytosines, 7-methylguanine and 7-methyladenine, 8-azaguanine and 8-azaadenine, 7-deazaguanine and 7-daazaadenine and 3-deazaguanine and 3-deazaadenine. Further nucleobases include those disclosed in U.S. Pat. No. 3,687,808, those disclosed in Modified Nucleosides in Biochemistry, Biotechnology and Medicine, Herdewijn, P. ed. Wiley-VCH, 2008; those disclosed in The Concise Encyclopedia Of Polymer Science And Engineering, pages 858-859, Kroschwitz, J. L, ed. John Wiley & Sons, 1990, these disclosed by Englisch et al., (1991) Angewandte Chemie, International Edition, 30:613, and those disclosed by Sanghvi, Y S., Chapter 15, dsRNA Research and Applications, pages 289-302, Crooke, S. T. and Lebleu, B., Ed., CRC Press, 1993. Certain of these nucleobases are particularly useful for increasing the binding affinity of the oligomeric compounds featured in the disclosure. These include 5-substituted pyrimidines, 6-azapyrimidines and N-2, N-6 and 0-6 substituted purines, including 2-aminopropyladenine, 5-propynyluracil and 5-propynylcytosine. 5-methylcytosine substitutions have been shown to increase nucleic acid duplex stability by 0.6-1.2° C. (Sanghvi, Y. S., Crooke, S. T. and Lebleu, B., Eds., dsRNA Research and Applications, CRC Press, Boca Raton, 1993, pp. 276-278) and are exemplary base substitutions, even more particularly when combined with 2′-O-methoxyethyl sugar modifications.

[0236] Representative U.S. patents that teach the preparation of certain of the above noted modified nucleobases as well as other modified nucleobases include, but are not limited to, the above noted U.S. Pat. Nos. 3,687,808, 4,845,205; 5,130,30; 5,134,066; 5,175,273; 5,367,066; 5,432,272; 5,457,187; 5,459,255; 5,484,908; 5,502,177; 5,525,711; 5,552,540; 5,587,469; 5,594,121, 5,596,091; 5,614,617; 5,681,941; 5,750,692; 6,015,886; 6,147,200; 6,166,197; 6,222,025; 6,235,887; 6,380,368; 6,528,640; 6,639,062; 6,617,438; 7,045,610; 7,427,672; and 7,495,088, the entire contents of each of which are hereby incorporated herein by reference.

[0237] An RNAi agent of the disclosure can also be modified to include one or more bicyclic sugar moities. A “bicyclic sugar” is a furanosyl ring modified by a ring formed by the bridging of two carbons, whether adjacent or non-adjacent atoms. A “bicyclic nucleoside” (“BNA”) is a nucleoside having a sugar moiety comprising a ring formed by bridging comprising a bridge connecting two carbons, whether adjacent or non-adjacent, two carbon atoms of the sugar ring, thereby forming a bicyclic ring system. In certain embodiments, the bridge connects the 4′-carbon and the 2′-carbon of the sugar ring, optionally, via the 2′-acyclic oxygen atom. Thus, in some embodiments an agent of the disclosure may include one or more locked nucleic acids (LNA). A locked nucleic acid is a nucleotide having a modified ribose moiety in which the ribose moiety comprises an extra bridge connecting the 2′ and 4′ carbons. In other words, an LNA is a nucleotide comprising a bicyclic sugar moiety comprising a 4′-CH2-O-2′ bridge. This structure effectively “locks” the ribose in the 3′-endo structural conformation. The addition of locked nucleic acids to siRNAs has been shown to increase siRNA stability in serum, and to reduce off-target effects (Elmen, J. et al., (2005) Nucleic Acids Research 33(1):439-447; Mook, O R. et al., (2007) Mol Canc Ther 6(3):833-843; Grunweller, A. et al., (2003) Nucleic Acids Research 31(12):3185-3193). Examples of bicyclic nucleosides for use in the polynucleotides of the disclosure include without limitation nucleosides comprising a bridge between the 4′ and the 2′ ribosyl ring atoms. In certain embodiments, the antisense polynucleotide agents of the disclosure include one or more bicyclic nucleosides comprising a 4′ to 2′ bridge.

[0238] A locked nucleoside can be represented by the structure (omitting stereochemistry),

[chemical structure]

[0239] wherein B is a nucleobase or modified nucleobase and L is the linking group that joins the 2′-carbon to the 4′-carbon of the ribose ring.

[0240] Examples of such 4′ to 2′ bridged bicyclic nucleosides, include but are not limited to 4′-(CH2)-O-2′ (LNA); 4′-(CH2)-S-2′; 4′-(CH2)2-O-2′ (ENA); 4′-CH(CH3)-O-2′ (also referred to as “constrained ethyl” or “cEt”) and 4′-CH(CH2OCH3)-O-2′ (and analogs thereof; see, e.g., U.S. Pat. No. 7,399,845); 4′-C(CH3)(CH3)-O-2′ (and analogs thereof; see e.g., U.S. Pat. No. 8,278,283); 4′-CH2-N(OCH3)-2′ (and analogs thereof; see e.g., U.S. Pat. No. 8,278,425); 4′-CH2-O—N(CH3)-2′ (see, e.g., U.S. Patent Publication No. 2004/0171570); 4′-CH2-N(R)—O-2′, wherein R is H, C1-C12 alkyl, or a nitrogen protecting group (see, e.g., U.S. Pat. No. 7,427,672); 4′-CH2-C(H)(CH3)-2′ (see, e.g., Chattopadhyaya et al., J. Org. Chem., 2009, 74, 118-134); and 4′-CH2-C(═CH2)-2′ (and analogs thereof; see, e.g., U.S. Pat. No. 8,278,426). The entire contents of each of the foregoing are hereby incorporated herein by reference.

[0241] Additional representative US patents and US patent Publications that teach the preparation of locked nucleic acid nucleotides include, but are not limited to, the following: U.S. Pat. Nos. 6,268,490; 6,525,191; 6,670,461; 6,770,748; 6,794,499; 6,998,484; 7,053,207; 7,034,133; 7,084,125; 7,399,845; 7,427,672; 7,569,686; 7,741,457; 8,022,193; 8,030,467; 8,278,425; 8,278,426; 8,278,283; US 2008/0039618; and US 2009/0012281, the entire contents of each of which are hereby incorporated herein by reference.

[0242] Any of the foregoing bicyclic nucleosides can be prepared having one or more stereochemical sugar configurations including for example α-L-ribofuranose and β-D-ribofuranose (see WO 99/14226).

[0243] An RNAi agent of the disclosure can also be modified to include one or more constrained ethyl nucleotides. As used herein, a “constrained ethyl nucleotide” or “cEt” is a locked nucleic acid comprising a bicyclic sugar moiety comprising a 4′-CH(CH3)-O-2′ bridge (i.e., L in the preceding structure). In one embodiment, a constrained ethyl nucleotide is in the S conformation referred to herein as “S-cEt.”

[0244] An RNAi agent of the disclosure may also include one or more “conformationally restricted nucleotides” (“CRN”). CRN are nucleotide analogs with a linker connecting the C2′ and C4′ carbons of ribose or the —C3′ and —C5′ carbons of ribose. CRN lock the ribose ring into a stable conformation and increase the hybridization affinity to mRNA. The linker is of sufficient length to place the oxygen in an optimal position for stability and affinity resulting in less ribose ring puckering.

[0245] Representative publications that teach the preparation of certain of the above noted CRN include, but are not limited to, US 2013/0190383 and WO 2013/036868, the entire contents of each of which are hereby incorporated herein by reference.

[0246] In some embodiments, a RNAi agent of the disclosure comprises one or more monomers that are UNA (unlocked nucleic acid) nucleotides. UNA is unlocked acyclic nucleic acid, wherein any of the bonds of the sugar has been removed, forming an unlocked “sugar” residue. In one example, UNA also encompasses monomer with bonds between C1′-C4′ have been removed (i.e. the covalent carbon-oxygen-carbon bond between the C1′ and C4′ carbons). In another example, the C2′-C3′ bond (i.e. the covalent carbon-carbon bond between the C2′ and C3′ carbons) of the sugar has been removed (see Nuc. Acids Symp. Series, 52, 133-134 (2008) and Fluiter et al., Mol. Biosyst., 2009, 10, 1039 hereby incorporated by reference).

[0247] Representative U.S. publications that teach the preparation of UNA include, but are not limited to, U.S. Pat. No. 8,314,227; and US Patent Publication Nos. 2013/0096289; 2013/0011922; and 2011/0313020, the entire contents of each of which are hereby incorporated herein by reference.

[0248] Potentially stabilizing modifications to the ends of RNA molecules can include N-(acetylaminocaproyl)-4-hydroxyprolinol (Hyp-C6-NHAc), N-(caproyl-4-hydroxyprolinol (Hyp-C6), N-(acetyl-4-hydroxyprolinol (Hyp-NHAc), thymidine-2′-O-deoxythymidine (ether), N-(aminocaproyl)-4-hydroxyprolinol (Hyp-C6-amino), 2-docosanoyl-uridine-3′-phosphate, inverted base dT(idT) and others. Disclosure of this modification can be found in WO 2011/005861.

[0249] Other modifications of a RNAi agent of the disclosure include a 5′ phosphate or 5′ phosphate mimic, e.g., a 5′-terminal phosphate or phosphate mimic on the antisense strand of a RNAi agent. Suitable phosphate mimics are disclosed in, for example US 2012/0157511, the entire contents of which are incorporated herein by reference.

[0250] A. Modified RNAi Agents Comprising Motifs of the Disclosure

[0251] In certain aspects of the disclosure, the double-stranded RNAi agents of the disclosure include agents with chemical modifications as disclosed, for example, in WO 2013/075035, the entire contents of which are incorporated herein by reference. As shown herein and in WO 2013/075035, one or more motifs of three identical modifications on three consecutive nucleotides may be introduced into a sense strand or antisense strand of an RNAi agent, particularly at or near the cleavage site. In some embodiments, the sense strand and antisense strand of the RNAi agent may otherwise be completely modified. The introduction of these motifs interrupts the modification pattern, if present, of the sense or antisense strand. The RNAi agent may be optionally conjugated with a lipophilic ligand, e.g., a C16 ligand, for instance on the sense strand. The RNAi agent may be optionally modified with a (S)-glycol nucleic acid (GNA) modification, for instance on one or more residues of the antisense strand.

[0252] Accordingly, the disclosure provides double stranded RNAi agents capable of inhibiting the expression of a targetgenome or gene (i.e., a GPR75 gene) in vivo. The RNAi agent comprises a sense strand and an antisense strand. Each strand of the RNAi agent may be 15-30 nucleotides in length. For example, each strand may be 16-30 nucleotides in length, 17-30 nucleotides in length, 25-30 nucleotides in length, 27-30 nucleotides in length, 17-23 nucleotides in length, 17-21 nucleotides in length, 17-19 nucleotides in length, 19-25 nucleotides in length, 19-23 nucleotides in length, 19-21 nucleotides in length, 21-25 nucleotides in length, or 21-23 nucleotides in length. In certain embodiments, each strand is 19-23 nucleotides in length.

[0253] The sense strand and antisense strand typically form a duplex double stranded RNA (“dsRNA”), also referred to herein as an “RNAi agent.” The duplex region of an RNAi agent may be 15-30 nucleotide pairs in length. For example, the duplex region can be 16-30 nucleotide pairs in length, 17-30 nucleotide pairs in length, 27-30 nucleotide pairs in length, 17-23 nucleotide pairs in length, 17-21 nucleotide pairs in length, 17-19 nucleotide pairs in length, 19-25 nucleotide pairs in length, 19-23 nucleotide pairs in length, 19-21 nucleotide pairs in length, 21-25 nucleotide pairs in length, or 21-23 nucleotide pairs in length. In another example, the duplex region is selected from 15, 16, 17, 18, 19, 20, 21, 22, 23, 24, 25, 26, and 27 nucleotides in length. In some embodiments, the duplex region is 19-21 nucleotide pairs in length.

[0254] In one embodiment, the RNAi agent may contain one or more overhang regions or capping groups at the 3′-end, 5′-end, or both ends of one or both strands. The overhang can be 1-6 nucleotides in length, for instance 2-6 nucleotides in length, 1-5 nucleotides in length, 2-5 nucleotides in length, 1-4 nucleotides in length, 2-4 nucleotides in length, 1-3 nucleotides in length, 2-3 nucleotides in length, or 1-2 nucleotides in length. In some embodiments, the nucleotide overhang region is 2 nucleotides in length. The overhangs can be the result of one strand being longer than the other, or the result of two strands of the same length being staggered. The overhang can form a mismatch with the target mRNA or it can be complementary to the gene sequences being targeted or can be another sequence. The first and second strands can also be joined, e.g., by additional bases to form a hairpin, or by other non-base linkers.

[0255] In one embodiment, the nucleotides in the overhang region of the RNAi agent can each independently be a modified or unmodified nucleotide including, but no limited to 2′-sugar modified, such as, 2-F, 2′-O-methyl, thymidine (T), and any combinations thereof.

[0256] For example, TT can be an overhang sequence for either end on either strand. The overhang can form a mismatch with the target mRNA or it can be complementary to the gene sequences being targeted or can be another sequence.

[0257] The 5′- or 3′-overhangs at the sense strand, antisense strand or both strands of the RNAi agent may be phosphorylated. In some embodiments, the overhang region(s) contains two nucleotides having a phosphorothioate between the two nucleotides, where the two nucleotides can be the same or different. In one embodiment, the overhang is present at the 3′-end of the sense strand, antisense strand, or both strands. In one embodiment, this 3′-overhang is present in the antisense strand. In one embodiment, this 3′-overhang is present in the sense strand.

[0258] The RNAi agent may contain only a single overhang, which can strengthen the interference activity of the RNAi, without affecting its overall stability. For example, the single-stranded overhang may be located at the 3-terminal end of the sense strand or, alternatively, at the 3-terminal end of the antisense strand. The RNAi may also have a blunt end, located at the 5′-end of the antisense strand (i.e., the 3′-end of the sense strand) or vice versa. Generally, the antisense strand of the RNAi has a nucleotide overhang at the 3′-end, and the 5′-end is blunt. While not wishing to be bound by theory, the asymmetric blunt end at the 5′-end of the antisense strand and 3′-end overhang of the antisense strand favor the guide strand loading into RISC process.

[0259] In one embodiment, the RNAi agent is a double blunt-ended of 19 nucleotides in length, wherein the sense strand contains at least one motif of three 2′-F modifications on three consecutive nucleotides at positions 7, 8, and 9 from the 5′ end. The antisense strand contains at least one motif of three 2′-O-methyl modifications on three consecutive nucleotides at positions 11, 12, and 13 from the 5′ end.

[0260] In another embodiment, the RNAi agent is a double blunt-ended of 20 nucleotides in length, wherein the sense strand contains at least one motif of three 2′-F modifications on three consecutive nucleotides at positions 8, 9, and 10 from the 5′ end. The antisense strand contains at least one motif of three 2′-O-methyl modifications on three consecutive nucleotides at positions 11, 12, and 13 from the 5′ end.

[0261] In yet another embodiment, the RNAi agent is a double blunt-ended of 21 nucleotides in length, wherein the sense strand contains at least one motif of three 2′-F modifications on three consecutive nucleotides at positions 9, 10, and 11 from the 5′ end. The antisense strand contains at least one motif of three 2′-O-methyl modifications on three consecutive nucleotides at positions 11, 12, and 13 from the 5′ end.

[0262] In one embodiment, the RNAi agent comprises a 21 nucleotide sense strand and a 23 nucleotide antisense strand, wherein the sense strand contains at least one motif of three 2′-F modifications on three consecutive nucleotides at positions 9, 10, and 11 from the 5′ end; the antisense strand contains at least one motif of three 2′-O-methyl modifications on three consecutive nucleotides at positions 11, 12, and 13 from the 5′ end, wherein one end of the RNAi agent is blunt, while the other end comprises a 2 nucleotide overhang. In one embodiment, the two nucleotide overhang is at the 3′-end of the antisense strand. When the two nucleotide overhang is at the 3′-end of the antisense strand, there may be two phosphorothioate internucleotide linkages between the terminal three nucleotides, wherein two of the three nucleotides are the overhang nucleotides, and the third nucleotide is a paired nucleotide next to the overhang nucleotide. In one embodiment, the RNAi agent additionally has two phosphorothioate internucleotide linkages between the terminal three nucleotides at both the 5′-end of the sense strand and at the 5′-end of the antisense strand. In one embodiment, every nucleotide in the sense strand and the antisense strand of the RNAi agent, including the nucleotides that are part of the motifs are modified nucleotides. In one embodiment each residue is independently modified with a 2′-O-methyl or 2′-fluoro, e.g., in an alternating motif. Optionally, the RNAi agent further comprises a ligand (e.g., a lipophilic ligand, optionally a C16 ligand).

[0263] In one embodiment, the RNAi agent comprises a sense and an antisense strand, wherein the sense strand is 25-30 nucleotide residues in length, wherein starting from the 5′ terminal nucleotide (position 1) positions 1 to 23 of the first strand comprise at least 8 ribonucleotides; the antisense strand is 36-66 nucleotide residues in length and, starting from the 3′ terminal nucleotide, comprises at least 8 ribonucleotides in the positions paired with positions 1-23 of sense strand to form a duplex; wherein at least the 3′ terminal nucleotide of antisense strand is unpaired with sense strand, and up to 6 consecutive 3′ terminal nucleotides are unpaired with sense strand, thereby forming a 3′ single stranded overhang of 1-6 nucleotides; wherein the 5′ terminus of antisense strand comprises from 10-consecutive nucleotides which are unpaired with sense strand, thereby forming a 10-30 nucleotide single stranded 5′ overhang; wherein at least the sense strand 5′ terminal and 3′ terminal nucleotides are base paired with nucleotides of antisense strand when sense and antisense strands are aligned for maximum complementarity, thereby forming a substantially duplexed region between sense and antisense strands; and antisense strand is sufficiently complementary to a target RNA along at least 19 ribonucleotides of antisense strand length to reduce target gene expression when the double stranded nucleic acid is introduced into a mammalian cell; and wherein the sense strand contains at least one motif of three 2′-F modifications on three consecutive nucleotides, where at least one of the motifs occurs at or near the cleavage site. The antisense strand contains at least one motif of three 2′-O-methyl modifications on three consecutive nucleotides at or near the cleavage site.

[0264] In one embodiment, the RNAi agent comprises sense and antisense strands, wherein the RNAi agent comprises a first strand having a length which is at least 25 and at most 29 nucleotides and a second strand having a length which is at most 30 nucleotides with at least one motif of three 2′-O-methyl modifications on three consecutive nucleotides at position 11, 12, and 13 from the 5′ end; wherein the 3′ end of the first strand and the 5′ end of the second strand form a blunt end and the second strand is 1-4 nucleotides longer at its 3′ end than the first strand, wherein the duplex region region which is at least 25 nucleotides in length, and the second strand is sufficiently complementary to a target mRNA along at least 19 nucleotide of the second strand length to reduce target gene expression when the RNAi agent is introduced into a mammalian cell, and wherein dicer cleavage of the RNAi agent results in an siRNA comprising the 3′ end of the second strand, thereby reducing expression of the target gene in the mammal. Optionally, the RNAi agent further comprises a ligand.

[0265] In one embodiment, the sense strand of the RNAi agent contains at least one motif of three identical modifications on three consecutive nucleotides, where one of the motifs occurs at the cleavage site in the sense strand.

[0266] In one embodiment, the antisense strand of the RNAi agent can also contain at least one motif of three identical modifications on three consecutive nucleotides, where one of the motifs occurs at or near the cleavage site in the antisense strand.

[0267] For an RNAi agent having a duplex region of 17-23 nucleotide in length, the cleavage site of the antisense strand is typically around the 10, 11 and 12 positions from the 5′-end. Thus the motifs of three identical modifications may occur at the 9, 10, and 11 positions; 10, 11, and 12 positions; 11, 12, and 13 positions; 12, 13, and 14 positions; or 13, 14, and 15 positions of the antisense strand, the count starting from the first nucleotide from the 5′-end of the antisense strand, or, the count starting from the first paired nucleotide within the duplex region from the 5′-end of the antisense strand. The cleavage site in the antisense strand may also change according to the length of the duplex region of the RNAi from the 5′-end.

[0268] The sense strand of the RNAi agent may contain at least one motif of three identical modifications on three consecutive nucleotides at the cleavage site of the strand; and the antisense strand may have at least one motif of three identical modifications on three consecutive nucleotides at or near the cleavage site of the strand. When the sense strand and the antisense strand form a dsRNA duplex, the sense strand and the antisense strand can be so aligned that one motif of the three nucleotides on the sense strand and one motif of the three nucleotides on the antisense strand have at least one nucleotide overlap, i.e., at least one of the three nucleotides of the motif in the sense strand forms a base pair with at least one of the three nucleotides of the motif in the antisense strand. Alternatively, at least two nucleotides may overlap, or all three nucleotides may overlap.

[0269] In one embodiment, the sense strand of the RNAi agent may contain more than one motif of three identical modifications on three consecutive nucleotides. The first motif may occur at or near the cleavage site of the strand and the other motifs may be a wing modification. The term “wing modification” herein refers to a motif occurring at another portion of the strand that is separated from the motif at or near the cleavage site of the same strand. The wing modification is either adjacent to the first motif or is separated by at least one or more nucleotides. When the motifs are immediately adjacent to each other then the chemistry of the motifs are distinct from each other and when the motifs are separated by one or more nucleotide than the chemistries can be the same or different. Two or more wing modifications may be present. For instance, when two wing modifications are present, each wing modification may occur at one end relative to the first motif which is at or near cleavage site or on either side of the lead motif.

[0270] Like the sense strand, the antisense strand of the RNAi agent may contain more than one motif of three identical modifications on three consecutive nucleotides, with at least one of the motifs occurring at or near the cleavage site of the strand. This antisense strand may also contain one or more wing modifications in an alignment similar to the wing modifications that may be present on the sense strand.

[0271] In one embodiment, the wing modification on the sense strand or antisense strand of the RNAi agent typically does not include the first one or two terminal nucleotides at the 3′-end, 5′-end or both ends of the strand.

[0272] In another embodiment, the wing modification on the sense strand or antisense strand of the RNAi agent typically does not include the first one or two paired nucleotides within the duplex region at the 3′-end, 5′-end or both ends of the strand.

[0273] When the sense strand and the antisense strand of the RNAi agent each contain at least one wing modification, the wing modifications may fall on the same end of the duplex region, and have an overlap of one, two or three nucleotides.

[0274] When the sense strand and the antisense strand of the RNAi agent each contain at least two wing modifications, the sense strand and the antisense strand can be so aligned that two modifications each from one strand fall on one end of the duplex region, having an overlap of one, two or three nucleotides; two modifications each from one strand fall on the other end of the duplex region, having an overlap of one, two or three nucleotides; two modifications one strand fall on each side of the lead motif, having an overlap of one, two, or three nucleotides in the duplex region.

[0275] In one embodiment, the RNAi agent comprises mismatch(es) with the target, within the duplex, or combinations thereof. The mistmatch may occur in the overhang region or the duplex region. The base pair may be ranked on the basis of their propensity to promote dissociation or melting (e.g., on the free energy of association or dissociation of a particular pairing, the simplest approach is to examine the pairs on an individual pair basis, though next neighbor or similar analysis can also be used). In terms of promoting dissociation: A:U is preferred over G:C; G:U is preferred over G:C; and I:C is preferred over G:C (I=inosine). Mismatches, e.g., non-canonical or other than canonical pairings (as described elsewhere herein) are preferred over canonical (A:T, A:U, G:C) pairings; and pairings which include a universal base are preferred over canonical pairings.

[0276] In one embodiment, the RNAi agent comprises at least one of the first 1, 2, 3, 4, or 5 base pairs within the duplex regions from the 5′-end of the antisense strand independently selected from the group of: A:U, G:U, I:C, and mismatched pairs, e.g., non-canonical or other than canonical pairings or pairings which include a universal base, to promote the dissociation of the antisense strand at the 5′-end of the duplex.

[0277] In one embodiment, the nucleotide at the 1 position within the duplex region from the 5′-end in the antisense strand is selected from the group consisting of A, dA, dU, U, and dT. Alternatively, at least one of the first 1, 2 or 3 base pair within the duplex region from the 5′-end of the antisense strand is an AU base pair. For example, the first base pair within the duplex region from the 5′-end of the antisense strand is an AU base pair.

[0278] In another embodiment, the nucleotide at the 3′-end of the sense strand is deoxythimidine (dT). In another embodiment, the nucleotide at the 3′-end of the antisense strand is deoxythimidine (dT). In one embodiment, there is a short sequence of deoxy-thymine nucleotides, for example, two dT nucleotides on the 3′-end of the sense or antisense strand.

[0279] In one embodiment, the sense strand sequence may be represented by formula (I):

5′nₚ-Nₐ—(XXX)ᵢ—N_{b}—YYY—N_{b}—(ZZZ)ⱼ—Nₐ-n_{q}3′ (I)
[0280] wherein:
[0281] i and j are each independently 0 or 1;
[0282] p and q are each independently 0-6;
[0283] each Nₐ independently represents an oligonucleotide sequence comprising 0-25 modified nucleotides, each sequence comprising at least two differently modified nucleotides;
[0284] each N_{b} independently represents an oligonucleotide sequence comprising 0-10 modified nucleotides;
[0285] each nₚ and n_{q} independently represent an overhang nucleotide;
[0286] wherein N_{b} and Y do not have the same modification; and
[0287] XXX, YYY and ZZZ each independently represent one motif of three identical modifications on three consecutive nucleotides. In one embodiment, YYY is all 2′-F modified nucleotides.

[0288] In one embodiment, the Nₐ or N_{b} comprise modifications of alternating pattern.

[0289] In one embodiment, the YYY motif occurs at or near the cleavage site of the sense strand. For example, when the RNAi agent has a duplex region of 17-23 nucleotides in length, the YYY motif can occur at or the vicinity of the cleavage site (e.g.: can occur at positions 6, 7, 8, 7, 8, 9, 8, 9, 10, 9, 10, 11, 10, 11,12 or 11, 12, 13) of—the sense strand, the count starting from the 1^{st} nucleotide, from the 5′-end; or optionally, the count starting at the 1^{st} paired nucleotide within the duplex region, from the 5′-end.

[0290] In one embodiment, i is 1 and j is 0, or i is 0 and j is 1, or both i and j are 1. The sense strand can therefore be represented by the following formulas:

5′nₚ-Nₐ—YYY—N_{b}—ZZZ—Nₐ-n_{q}3′ (Ib);

5′nₚ-Nₐ—XXX—N_{b}—YYY—Nₐ-n_{q}3′ (Ic); or

5′nₚ-Nₐ—XXX—N_{b}—YYY—N_{b}—ZZZ—Nₐ-n_{q}3′ (Id).

[0291] When the sense strand is represented by formula (Ib), N_{b} represents an oligonucleotide sequence comprising 0-10, 0-7, 0-5, 0-4, 0-2 or 0 modified nucleotides.

[0292] Each Nₐ independently can represent an oligonucleotide sequence comprising 2-20, 2-15, or 2-10 modified nucleotides.

[0293] When the sense strand is represented as formula (Ic), N_{b} represents an oligonucleotide sequence comprising 0-10, 0-7, 0-10, 0-7, 0-5, 0-4, 0-2 or 0 modified nucleotides. Each Nₐ can independently represent an oligonucleotide sequence comprising 2-20, 2-15, or 2-10 modified nucleotides.

[0294] When the sense strand is represented as formula (Id), each N_{b} independently represents an oligonucleotide sequence comprising 0-10, 0-7, 0-5, 0-4, 0-2 or 0 modified nucleotides. In some embodiments, N_{b} is 0, 1, 2, 3, 4, 5 or 6. Each Nₐ can independently represent an oligonucleotide sequence comprising 2-20, 2-15, or 2-10 modified nucleotides.

[0295] Each of X, Y and Z may be the same or different from each other.

[0296] In other embodiments, i is 0 and j is 0, and the sense strand may be represented by the formula:

5′nₚ-Nₐ—YYY—Nₐ-n_{q}3′ (Ia).

[0297] When the sense strand is represented by formula (Ia), each Nₐ independently can represent an oligonucleotide sequence comprising 2-20, 2-15, or 2-10 modified nucleotides.

[0298] In one embodiment, the antisense strand sequence of the RNAi may be represented by formula (II):

5′n_{q′}-Nₐ′—(Z′Z′Z′)ₖ—N_{b}′—Y′Y′Y′—N_{b}′—(X′X′X′)ᵢ—Nₐ′-n_{p′}3′ (II)
[0299] wherein:
[0300] k and l are each independently 0 or 1;
[0301] p′ and q′ are each independently 0-6;
[0302] each Nₐ′ independently represents an oligonucleotide sequence comprising 0-25 modified nucleotides, each sequence comprising at least two differently modified nucleotides;
[0303] each N_{b}′ independently represents an oligonucleotide sequence comprising 0-10 modified nucleotides;
[0304] each nₚ′ and n_{q}′ independently represent an overhang nucleotide;
[0305] wherein N_{b}′ and Y′ do not have the same modification; and
[0306] X′X′X′, Y′Y′Y′ and Z′Z′Z′ each independently represent one motif of three identical modifications on three consecutive nucleotides.

[0307] In one embodiment, the Nₐ′ or N_{b}′ comprise modifications of alternating pattern.

[0308] The Y′Y′Y′ motif occurs at or near the cleavage site of the antisense strand. For example, when the RNAi agent has a duplex region of 17-23nucleotide in length, the Y′Y′Y′ motif can occur at positions 9, 10, 11; 10, 11, 12; 11, 12, 13; 12, 13, 14; or 13, 14, 15 of the antisense strand, with the count starting from the 1^{st} nucleotide, from the 5′-end; or optionally, the count starting at the 1^{st} paired nucleotide within the duplex region, from the 5′-end. In some embodiments, the Y′Y′Y′ motif occurs at positions 11, 12, 13.

[0309] In one embodiment, Y′Y′Y′ motif is all 2′-OMe modified nucleotides.

[0310] In one embodiment, k is 1 and 1 is 0, or k is 0 and 1 is 1, or both k and l are 1.

[0311] The antisense strand can therefore be represented by the following formulas:

5′n_{q′}-Nₐ′—Z′Z′Z′—N_{b}′—Y′Y′Y′—Nₐ′-n_{p′}3′ (IIb);

5′n_{q′}-Nₐ′—Y′Y′Y′—N_{b}′—X′X′X′-n_{p′}3′ (IIc); or

5′n_{q′}-Nₐ′—Z′Z′Z′—N_{b}′—Y′Y′Y′—N_{b}′—X′X′X′—Nₐ′-n_{p′}3′ (IId).

[0312] When the antisense strand is represented by formula (IIb), N_{b}′ represents an oligonucleotide sequence comprising 0-10, 0-7, 0-10, 0-7, 0-5, 0-4, 0-2 or 0 modified nucleotides. Each Nₐ′ independently represents an oligonucleotide sequence comprising 2-20, 2-15, or 2-10 modified nucleotides.

[0313] When the antisense strand is represented as formula (IIc), N_{b}′ represents an oligonucleotide sequence comprising 0-10, 0-7, 0-10, 0-7, 0-5, 0-4, 0-2 or 0 modified nucleotides. Each Nₐ′ independently represents an oligonucleotide sequence comprising 2-20, 2-15, or 2-10 modified nucleotides.

[0314] When the antisense strand is represented as formula (IId), each N_{b}′ independently represents an oligonucleotide sequence comprising 0-10, 0-7, 0-10, 0-7, 0-5, 0-4, 0-2 or 0 modified nucleotides. Each Nₐ′ independently represents an oligonucleotide sequence comprising 2-20, 2-15, or 2-10 modified nucleotides. In some embodiments, N_{b} is 0, 1, 2, 3, 4, 5 or 6.

[0315] In other embodiments, k is 0 and 1 is 0 and the antisense strand may be represented by the formula:

5′n_{p′}-Nₐ—Y′Y′Y′—Nₐ-n_{q′}3′ (Ia).

[0316] When the antisense strand is represented as formula (IIa), each Nₐ′ independently represents an oligonucleotide sequence comprising 2-20, 2-15, or 2-10 modified nucleotides.

[0317] Each of X′, Y′ and Z′ may be the same or different from each other.

[0318] Each nucleotide of the sense strand and antisense strand may be independently modified with LNA, glycol nucleic acid (GNA), hexitol nucleic acid (HNA), 2′-methoxyethyl, 2′-O-methyl, 2′-O-allyl, 2′-C-allyl, 2′-hydroxyl, or 2′-fluoro. For example, each nucleotide of the sense strand and antisense strand is independently modified with 2′-O-methyl or 2′-fluoro. Each X, Y, Z, X′, Y′ and Z′, in particular, may represent a 2′-O-methyl modification or a 2′-fluoro modification.

[0319] In one embodiment, the sense strand of the RNAi agent may contain YYY motif occurring at 9, 10 and 11 positions of the strand when the duplex region is 21 nt, the count starting from the 1^{st} nucleotide from the 5′-end, or optionally, the count starting at the 1^{st} paired nucleotide within the duplex region, from the 5′-end; and Y represents 2′-F modification. The sense strand may additionally contain XXX motif or ZZZ motifs as wing modifications at the opposite end of the duplex region; and XXX and ZZZ each independently represents a 2′-OMe modification or 2′-F modification.

[0320] In one embodiment the antisense strand may contain Y′Y′Y′ motif occurring at positions 11, 12, 13 of the strand, the count starting from the 1^{st} nucleotide from the 5′-end, or optionally, the count starting at the 1^{st} paired nucleotide within the duplex region, from the 5′-end; and Y′ represents 2′-O-methyl modification. The antisense strand may additionally contain X′X′X′ motif or Z′Z′Z′ motifs as wing modifications at the opposite end of the duplex region; and X′X′X′ and Z′Z′Z′ each independently represents a 2′-OMe modification or 2′-F modification.

[0321] The sense strand represented by any one of the above formulas (Ia), (Ib), (Ic), and (Id) forms a duplex with a antisense strand being represented by any one of formulas (IIa), (IIb), (IIc), and (IId), respectively.

[0322] Accordingly, the RNAi agents for use in the methods of the disclosure may comprise a sense strand and an antisense strand, each strand having 14 to 30 nucleotides, the RNAi duplex represented by formula (III):

sense:5′nₚ-Nₐ—(XXX)ᵢ—N_{b}—YYY—N_{b}—(ZZZ)ⱼ—Nₐ′-n_{q}′3′

antisense:3′nₚ′—Nₐ′—(X′X′X′)ₖ—N_{b}′—Y′Y′Y′—N_{b}′—(Z′Z′Z′)ᵢNₐ′-n_{q}′5′ (III)
[0323] wherein:
[0324] i, j, k, and 1 are each independently 0 or 1;
[0325] p, p′, q, and q′ are each independently 0-6;
[0326] each Nₐ and Nₐ′ independently represents an oligonucleotide sequence comprising 0-25 modified nucleotides, each sequence comprising at least two differently modified nucleotides;
[0327] each N_{b} and N_{b}′ independently represents an oligonucleotide sequence comprising 0-10 modified nucleotides;
[0328] wherein
[0329] each nₚ′, nₚ, n_{q}′, and n_{q}, each of which may or may not be present, independently represents an overhang nucleotide; and
[0330] XXX, YYY, ZZZ, X′X′X′, Y′Y′Y′, and Z′Z′Z′ each independently represent one motif of three identical modifications on three consecutive nucleotides.

[0331] In one embodiment, i is 0 and j is 0; or i is 1 and j is 0; or i is 0 and j is 1; or both i and j are 0; or both i and j are 1. In another embodiment, k is 0 and 1 is 0; or k is 1 and 1 is 0; k is 0 and 1 is 1; or both k and l are 0; or both k and l are 1.

[0332] Exemplary combinations of the sense strand and antisense strand forming a RNAi duplex include the formulas below:

5′nₚ-Nₐ—YYY—Nₐ-n_{q}3′

3′nₚ′—Nₐ′—Y′Y′Y′—Nₐ′n_{q}′5′ (IIIa)

5′nₚ-Nₐ—YYY—N_{b}—ZZZ—Nₐ-n_{q}3′

3′nₚ′—Nₐ′—Y′Y′Y′—N_{b}′—Z′Z′Z′—Nₐ′n_{q}′5′ (IIIb)

5′nₚ-Nₐ—XXX—N_{b}—YYY—Nₐ-n_{q}3′

3′nₚ′—Nₐ′—X′X′X′—N_{b}′—Y′Y′Y′—Nₐ′-n_{q}′5′ (IIc)

5′nₚ-Nₐ—XXX—N_{b}—YYY—N_{b}—ZZZ—Nₐ-n_{q}3′

3′nₚ′—Nₐ′—X′X′X′—N_{b}′—Y′Y′Y′—N_{b}′—Z′Z′Z′—Nₐ-n_{q}′5′ (IIId)

[0333] When the RNAi agent is represented by formula (IIIa), each Nₐ independently represents an oligonucleotide sequence comprising 2-20, 2-15, or 2-10 modified nucleotides.

[0334] When the RNAi agent is represented by formula (IIIb), each N_{b} independently represents an oligonucleotide sequence comprising 1-10, 1-7, 1-5 or 1-4 modified nucleotides. Each Nₐ independently represents an oligonucleotide sequence comprising 2-20, 2-15, or 2-10 modified nucleotides.

[0335] When the RNAi agent is represented as formula (IIIc), each N_{b}, N_{b}′ independently represents an oligonucleotide sequence comprising 0-10, 0-7, 0-10, 0-7, 0-5, 0-4, 0-2 or 0 modified nucleotides.

[0336] Each Nₐ independently represents an oligonucleotide sequence comprising 2-20, 2-15, or 2-10 modified nucleotides.

[0337] When the RNAi agent is represented as formula (IIId), each N_{b}, N_{b}′ independently represents an oligonucleotide sequence comprising 0-10, 0-7, 0-10, 0-7, 0-5, 0-4, 0-2 or 0 modified nucleotides. Each Nₐ, Nₐ′ independently represents an oligonucleotide sequence comprising 2-20, 2-15, or 2-10 modified nucleotides. Each of Nₐ, Nₐ′, N_{b} and N_{b}′ independently comprises modifications of alternating pattern.

[0338] In one embodiment, when the RNAi agent is represented by formula (IIId), the Nₐ modifications are 2′-O-methyl or 2′-fluoro modifications. In another embodiment, when the RNAi agent is represented by formula (IIId), the Nₐ modifications are 2′-O-methyl or 2′-fluoro modifications and nₚ′>0 and at least one nₚ′ is linked to a neighboring nucleotide a via phosphorothioate linkage. In yet another embodiment, when the RNAi agent is represented by formula (IIId), the Nₐ modifications are 2′-O-methyl or 2′-fluoro modifications, nₚ′>0 and at least one nₚ′ is linked to a neighboring nucleotide via phosphorothioate linkage, and the sense strand is conjugated to one or more C16 (or related) moieties attached through a bivalent or trivalent branched linker (described below). In another embodiment, when the RNAi agent is represented by formula (IIId), the Nₐ modifications are 2′-O-methyl or 2′-fluoro modifications, nₚ′>0 and at least one nₚ′ is linked to a neighboring nucleotide via phosphorothioate linkage, the sense strand comprises at least one phosphorothioate linkage, and the sense strand is conjugated to one or more lipophilic, e.g., C16 (or related) moieties, optionally attached through a bivalent or trivalent branched linker.

[0339] In one embodiment, when the RNAi agent is represented by formula (IIIa), the Nₐ modifications are 2′-O-methyl or 2′-fluoro modifications, nₚ′>0 and at least one nₚ′ is linked to a neighboring nucleotide via phosphorothioate linkage, the sense strand comprises at least one phosphorothioate linkage, and the sense strand is conjugated to one or more lipophilic, e.g., C16 (or related) moieties attached through a bivalent or trivalent branched linker.

[0340] In one embodiment, the RNAi agent is a multimer containing at least two duplexes represented by formula (III), (IIIa), (IIIb), (IIc), and (IIId), wherein the duplexes are connected by a linker. The linker can be cleavable or non-cleavable. Optionally, the multimer further comprises a ligand. Each of the duplexes can target the same gene or two different genes; or each of the duplexes can target same gene at two different target sites.

[0341] In one embodiment, the RNAi agent is a multimer containing three, four, five, six or more duplexes represented by formula (III), (IIIa), (IIIb), (IIc), and (IIId), wherein the duplexes are connected by a linker. The linker can be cleavable or non-cleavable. Optionally, the multimer further comprises a ligand. Each of the duplexes can target the same gene or two different genes; or each of the duplexes can target same gene at two different target sites.

[0342] In one embodiment, two RNAi agents represented by formula (III), (IIIa), (IIIb), (IIc), and (IIId) are linked to each other at the 5′ end, and one or both of the 3′ ends and are optionally conjugated to a ligand. Each of the agents can target the same gene or two different genes; or each of the agents can target same gene at two different target sites.

[0343] Various publications describe multimeric RNAi agents that can be used in the methods of the disclosure. Such publications include WO2007/091269, WO2010/141511, WO2007/117686, WO2009/014887, and WO2011/031520; and U.S. Pat. No. 7,858,769, the entire contents of each of which are hereby incorporated herein by reference.

[0344] In certain embodiments, the compositions and methods of the disclosure include a vinyl phosphonate (VP) modification of an RNAi agent as described herein. In exemplary embodiments, a 5′-vinyl phosphonate modified nucleotide of the disclosure has the structure:

[chemical structure]

wherein X is O or S;
[0345] R is hydrogen, hydroxy, fluoro, or C₁₋₂₀alkoxy (e.g., methoxy or n-hexadecyloxy); R^{5′} is ═C(H)—P(O)(OH)₂ and the double bond between the C5′ carbon and R^{5′} is in the E or Z orientation (e.g., E orientation); and
[0346] B is a nucleobase or a modified nucleobase, optionally where B is adenine, guanine, cytosine, thymine, or uracil.

[0347] A vinyl phosphonate of the instant disclosure may be attached to either the antisense or the sense strand of a dsRNA of the disclosure. In certain embodiments, a vinyl phosphonate of the instant disclosure is attached to the antisense strand of a dsRNA, optionally at the 5′ end of the antisense strand of the dsRNA.

[0348] Vinyl phosphonate modifications are also contemplated for the compositions and methods of the instant disclosure. An exemplary vinyl phosphonate structure includes the preceding structure, where R5′ is ═C(H)—OP(O)(OH)2 and the double bond between the C5′ carbon and R5′ is in the E or Z orientation (e.g., E orientation).

[0349] E. Thermally Destabilizing Modifications

[0350] In certain embodiments, a dsRNA molecule can be optimized for RNA interference by incorporating thermally destabilizing modifications in the seed region of the antisense strand. As used herein “seed region” means at positions 2-9 of the 5′-end of the referenced strand. For example, thermally destabilizing modifications can be incorporated in the seed region of the antisense strand to reduce or inhibit off-target gene silencing.

[0351] The term “thermally destabilizing modification(s)” includes modification(s) that would result with a dsRNA with a lower overall melting temperature (Tm) than the Tm of the dsRNA without having such modification(s). For example, the thermally destabilizing modification(s) can decrease the Tm of the dsRNA by 1-4° C., such as one, two, three or four degrees Celcius. And, the term “thermally destabilizing nucleotide” refers to a nucleotide containing one or more thermally destabilizing modifications.

[0352] It has been discovered that dsRNAs with an antisense strand comprising at least one thermally destabilizing modification of the duplex within the first 9 nucleotide positions, counting from the 5′ end, of the antisense strand have reduced off-target gene silencing activity. Accordingly, in some embodiments, the antisense strand comprises at least one (e.g., one, two, three, four, five or more) thermally destabilizing modification of the duplex within the first 9 nucleotide positions of the 5′ region of the antisense strand. In some embodiments, one or more thermally destabilizing modification(s) of the duplex is/are located in positions 2-9, such as positions 4-8, from the 5′-end of the antisense strand. In some further embodiments, the thermally destabilizing modification(s) of the duplex is/are located at position 6, 7 or 8 from the 5′-end of the antisense strand. In still some further embodiments, the thermally destabilizing modification of the duplex is located at position 7 from the 5′-end of the antisense strand. In some embodiments, the thermally destabilizing modification of the duplex is located at position 2, 3, 4, 5 or 9 from the 5′-end of the antisense strand.

[0353] The thermally destabilizing modifications can include, but are not limited to, abasic modification; mismatch with the opposing nucleotide in the opposing strand; and sugar modification such as 2′-deoxy modification or acyclic nucleotide, e.g., unlocked nucleic acids (UNA) or glycol nucleic acid (GNA).

[0354] Exemplified abasic modifications include, but are not limited to the following:

[chemical structure]

### Wherein R═H, Me, Et or OMe; R′ ═H, Me, Et or OMe; R″═H, Me, Et or OMe

[chemical structure]

wherein B is a modified or unmodified nucleobase.

[0356] Exemplified sugar modifications include, but are not limited to the following:

[chemical structure]

wherein B is a modified or unmodified nucleobase.

[0357] In some embodiments the thermally destabilizing modification of the duplex is selected from the group consisting of:

[chemical structure]

wherein B is a modified or unmodified nucleobase and the asterisk on each structure represents either R, S or racemic.

[0358] The term “acyclic nucleotide” refers to any nucleotide having an acyclic ribose sugar, for example, where any of bonds between the ribose carbons (e.g., C1′-C2′, C2′-C3′, C3′-C4′, C4′-O4′, or C1′-O4′) is absent or at least one of ribose carbons or oxygen (e.g., C1′, C2′, C3′, C4′, or O4′) are independently or in combination absent from the nucleotide. In some embodiments, acyclic nucleotide is

[chemical structure]

wherein B is a modified or unmodified nucleobase, R¹ and R² independently are H, halogen, OR₃, or alkyl; and R₃ is H, alkyl, cycloalkyl, aryl, aralkyl, heteroaryl or sugar). The term “UNA” refers to unlocked acyclic nucleic acid, wherein any of the bonds of the sugar has been removed, forming an unlocked “sugar” residue. In one example, UNA also encompasses monomers with bonds between C1′-C4′ being removed (i.e. the covalent carbon-oxygen-carbon bond between the C1′ and C4′ carbons). In another example, the C2′-C3′ bond (i.e. the covalent carbon-carbon bond between the C2′ and C3′ carbons) of the sugar is removed (see Mikhailov et. al., Tetrahedron Letters, 26 (17): 2059 (1985); and Fluiter et al., Mol. Biosyst., 10: 1039 (2009), which are hereby incorporated by reference in their entirety). The acyclic derivative provides greater backbone flexibility without affecting the Watson-Crick pairings. The acyclic nucleotide can be linked via 2′-5′ or 3′-5′ linkage.

[0359] The term ‘GNA’ refers to glycol nucleic acid which is a polymer similar to DNA or RNA but differing in the composition of its “backbone” in that is composed of repeating glycerol units linked by phosphodiester bonds:

[chemical structure]

[0360] The thermally destabilizing modification of the duplex can be mismatches (i.e., noncomplementary base pairs) between the thermally destabilizing nucleotide and the opposing nucleotide in the opposite strand within the dsRNA duplex. Exemplary mismatch base pairs include G:G, G:A, G:U, G:T, A:A, A:C, C:C, C:U, C:T, U:U, T:T, U:T, or a combination thereof. Other mismatch base pairings known in the art are also amenable to the present invention. A mismatch can occur between nucleotides that are either naturally occurring nucleotides or modified nucleotides, i.e., the mismatch base pairing can occur between the nucleobases from respective nucleotides independent of the modifications on the ribose sugars of the nucleotides. In certain embodiments, the dsRNA molecule contains at least one nucleobase in the mismatch pairing that is a 2′-deoxy nucleobase; e.g., the 2′-deoxy nucleobase is in the sense strand.

[0361] In some embodiments, the thermally destabilizing modification of the duplex in the seed region of the antisense strand includes nucleotides with impaired Watson-Crick hydrogen-bonding W—C H-bonding to the complementary base on the target mRNA, such as modified nucleobases:

[chemical structure]

[0362] More examples of abasic nucleotide, acyclic nucleotide modifications (including UNA and GNA), and mismatch modifications have been described in detail in WO 2011/133876, which is herein incorporated by reference in its entirety.

The thermally destabilizing modifications may also include universal base with reduced or abolished capability to form hydrogen bonds with the opposing bases, and phosphate modifications.

[0363] In some embodiments, the thermally destabilizing modification of the duplex includes nucleotides with non-canonical bases such as, but not limited to, nucleobase modifications with impaired or completely abolished capability to form hydrogen bonds with bases in the opposite strand. These nucleobase modifications have been evaluated for destabilization of the central region of the dsRNA duplex as described in WO 2010/0011895, which is herein incorporated by reference in its entirety. Exemplary nucleobase modifications are:

[chemical structure]

[0364] In some embodiments, the thermally destabilizing modification of the duplex in the seed region of the antisense strand includes one or more α-nucleotide complementary to the base on the target mRNA, such as:

[chemical structure]

wherein R is H, OH, OCH₃, F, NH₂, NHMe, NMe₂ or O-alkyl.

[0365] Exemplary phosphate modifications known to decrease the thermal stability of dsRNA duplexes compared to natural phosphodiester linkages are:

[chemical structure]

R=alkyl

[0366] The alkyl for the R group can be a C₁-C₆alkyl. Specific alkyls for the R group include, but are not limited to methyl, ethyl, propyl, isopropyl, butyl, pentyl and hexyl.

[0367] As the skilled artisan will recognize, in view of the functional role of nucleobases is defining specificity of a RNAi agent of the disclosure, while nucleobase modifications can be performed in the various manners as described herein, e.g., to introduce destabilizing modifications into a RNAi agent of the disclosure, e.g., for purpose of enhancing on-target effect relative to off-target effect, the range of modifications available and, in general, present upon RNAi agents of the disclosure tends to be much greater for non-nucleobase modifications, e.g., modifications to sugar groups or phosphate backbones of polyribonucleotides. Such modifications are described in greater detail in other sections of the instant disclosure and are expressly contemplated for RNAi agents of the disclosure, either possessing native nucleobases or modified nucleobases as described above or elsewhere herein.

[0368] In addition to the antisense strand comprising a thermally destabilizing modification, the dsRNA can also comprise one or more stabilizing modifications. For example, the dsRNA can comprise at least two (e.g., two, three, four, five, six, seven, eight, nine, ten or more) stabilizing modifications. Without limitations, the stabilizing modifications all can be present in one strand. In some embodiments, both the sense and the antisense strands comprise at least two stabilizing modifications. The stabilizing modification can occur on any nucleotide of the sense strand or antisense strand. For instance, the stabilizing modification can occur on every nucleotide on the sense strand or antisense strand; each stabilizing modification can occur in an alternating pattern on the sense strand or antisense strand; or the sense strand or antisense strand comprises both stabilizing modification in an alternating pattern. The alternating pattern of the stabilizing modifications on the sense strand may be the same or different from the antisense strand, and the alternating pattern of the stabilizing modifications on the sense strand can have a shift relative to the alternating pattern of the stabilizing modifications on the antisense strand.

[0369] In some embodiments, the antisense strand comprises at least two (e.g., two, three, four, five, six, seven, eight, nine, ten or more) stabilizing modifications. Without limitations, a stabilizing modification in the antisense strand can be present at any positions. In some embodiments, the antisense comprises stabilizing modifications at positions 2, 6, 8, 9, 14, and 16 from the 5′-end. In some other embodiments, the antisense comprises stabilizing modifications at positions 2, 6, 14, and 16 from the 5′-end. In still some other embodiments, the antisense comprises stabilizing modifications at positions 2, 14, and 16 from the 5′-end.

[0370] In some embodiments, the antisense strand comprises at least one stabilizing modification adjacent to the destabilizing modification. For example, the stabilizing modification can be the nucleotide at the 5′-end or the 3′-end of the destabilizing modification, i.e., at position −1 or +1 from the position of the destabilizing modification. In some embodiments, the antisense strand comprises a stabilizing modification at each of the 5′-end and the 3′-end of the destabilizing modification, i.e., positions −1 and +1 from the position of the destabilizing modification.

[0371] In some embodiments, the antisense strand comprises at least two stabilizing modifications at the 3′-end of the destabilizing modification, i.e., at positions +1 and +2 from the position of the destabilizing modification.

[0372] In some embodiments, the sense strand comprises at least two (e.g., two, three, four, five, six, seven, eight, nine, ten or more) stabilizing modifications. Without limitations, a stabilizing modification in the sense strand can be present at any positions. In some embodiments, the sense strand comprises stabilizing modifications at positions 7, 10, and 11 from the 5′-end. In some other embodiments, the sense strand comprises stabilizing modifications at positions 7, 9, 10, and 11 from the 5′-end. In some embodiments, the sense strand comprises stabilizing modifications at positions opposite or complimentary to positions 11, 12, and 15 of the antisense strand, counting from the 5′-end of the antisense strand. In some other embodiments, the sense strand comprises stabilizing modifications at positions opposite or complimentary to positions 11, 12, 13, and 15 of the antisense strand, counting from the 5′-end of the antisense strand. In some embodiments, the sense strand comprises a block of two, three, or four stabilizing modifications.

[0373] In some embodiments, the sense strand does not comprise a stabilizing modification in position opposite or complimentary to the thermally destabilizing modification of the duplex in the antisense strand.

[0374] Exemplary thermally stabilizing modifications include, but are not limited to, 2′-fluoro modifications. Other thermally stabilizing modifications include, but are not limited to, LNA.

[0375] In some embodiments, the dsRNA of the disclosure comprises at least four (e.g., four, five, six, seven, eight, nine, ten, or more) 2′-fluoro nucleotides. Without limitations, the 2′-fluoro nucleotides all can be present in one strand. In some embodiments, both the sense and the antisense strands comprise at least two 2′-fluoro nucleotides. The 2′-fluoro modification can occur on any nucleotide of the sense strand or antisense strand. For instance, the 2′-fluoro modification can occur on every nucleotide on the sense strand or antisense strand; each 2′-fluoro modification can occur in an alternating pattern on the sense strand or antisense strand; or the sense strand or antisense strand comprises both 2′-fluoro modifications in an alternating pattern. The alternating pattern of the 2′-fluoro modifications on the sense strand may be the same or different from the antisense strand, and the alternating pattern of the 2′-fluoro modifications on the sense strand can have a shift relative to the alternating pattern of the 2′-fluoro modifications on the antisense strand.

[0376] In some embodiments, the antisense strand comprises at least two (e.g., two, three, four, five, six, seven, eight, nine, ten, or more) 2′-fluoro nucleotides. Without limitations, a 2′-fluoro modification in the antisense strand can be present at any positions. In some embodiments, the antisense comprises 2′-fluoro nucleotides at positions 2, 6, 8, 9, 14, and 16 from the 5′-end. In some other embodiments, the antisense comprises 2′-fluoro nucleotides at positions 2, 6, 14, and 16 from the 5′-end. In still some other embodiments, the antisense comprises 2′-fluoro nucleotides at positions 2, 14, and 16 from the 5′-end.

[0377] In some embodiments, the antisense strand comprises at least one 2′-fluoro nucleotide adjacent to the destabilizing modification. For example, the 2′-fluoro nucleotide can be the nucleotide at the 5′-end or the 3′-end of the destabilizing modification, i.e., at position −1 or +1 from the position of the destabilizing modification. In some embodiments, the antisense strand comprises a 2′-fluoro nucleotide at each of the 5′-end and the 3′-end of the destabilizing modification, i.e., positions −1 and +1 from the position of the destabilizing modification.

[0378] In some embodiments, the antisense strand comprises at least two 2′-fluoro nucleotides at the 3′-end of the destabilizing modification, i.e., at positions+1 and +2 from the position of the destabilizing modification.

[0379] In some embodiments, the sense strand comprises at least two (e.g., two, three, four, five, six, seven, eight, nine, ten, or more) 2′-fluoro nucleotides. Without limitations, a 2′-fluoro modification in the sense strand can be present at any positions. In some embodiments, the antisense comprises 2′-fluoro nucleotides at positions 7, 10, and 11 from the 5′-end. In some other embodiments, the sense strand comprises 2′-fluoro nucleotides at positions 7, 9, 10, and 11 from the 5′-end. In some embodiments, the sense strand comprises 2′-fluoro nucleotides at positions opposite or complimentary to positions 11, 12, and 15 of the antisense strand, counting from the 5′-end of the antisense strand. In some other embodiments, the sense strand comprises 2′-fluoro nucleotides at positions opposite or complimentary to positions 11, 12, 13, and 15 of the antisense strand, counting from the 5′-end of the antisense strand. In some embodiments, the sense strand comprises a block of two, three or four 2′-fluoro nucleotides.

[0380] In some embodiments, the sense strand does not comprise a 2′-fluoro nucleotide in position opposite or complimentary to the thermally destabilizing modification of the duplex in the antisense strand.

[0381] In some embodiments, the dsRNA molecule of the disclosure comprises a 21 nucleotides (nt) sense strand and a 23 nucleotides (nt) antisense, wherein the antisense strand contains at least one thermally destabilizing nucleotide, where the at least one thermally destabilizing nucleotide occurs in the seed region of the antisense strand (i.e., at position 2-9 of the 5′-end of the antisense strand), wherein one end of the dsRNA is blunt, while the other end is comprises a two nucleotide overhang, and wherein the dsRNA optionally further has at least one (e.g., one, two, three, four, five, six or all seven) of the following characteristics: (i) the antisense comprises 2, 3, 4, 5, or 6 2′-fluoro modifications; (ii) the antisense comprises 1, 2, 3, 4, or 5 phosphorothioate internucleotide linkages; (iii) the sense strand is conjugated with a ligand; (iv) the sense strand comprises 2, 3, 4, or 5 2′-fluoro modifications; (v) the sense strand comprises 1, 2, 3, 4, or 5 phosphorothioate internucleotide linkages; (vi) the dsRNA comprises at least four 2′-fluoro modifications; and (vii) the dsRNA comprises a blunt end at 5′-end of the antisense strand. In one embodiment, the two nucleotide overhang is at the 3′-end of the antisense.

[0382] In some embodiments, the dsRNA molecule of the disclosure comprising a sense and antisense strands, wherein: the sense strand is 25-30 nucleotide residues in length, wherein starting from the 5′ terminal nucleotide (position 1), positions 1 to 23 of said sense strand comprise at least 8 ribonucleotides; antisense strand is 36-66 nucleotide residues in length and, starting from the 3′ terminal nucleotide, at least 8 ribonucleotides in the positions paired with positions 1-23 of sense strand to form a duplex; wherein at least the 3′ terminal nucleotide of antisense strand is unpaired with sense strand, and up to 6 consecutive 3′ terminal nucleotides are unpaired with sense strand, thereby forming a 3′ single stranded overhang of 1-6 nucleotides; wherein the 5′ terminus of antisense strand comprises from 10-30 consecutive nucleotides which are unpaired with sense strand, thereby forming a 10-30 nucleotide single stranded 5′ overhang; wherein at least the sense strand 5′ terminal and 3′ terminal nucleotides are base paired with nucleotides of antisense strand when sense and antisense strands are aligned for maximum complementarity, thereby forming a substantially duplexed region between sense and antisense strands; and antisense strand is sufficiently complementary to a target RNA along at least 19 ribonucleotides of antisense strand length to reduce target gene expression when said double stranded nucleic acid is introduced into a mammalian cell; and wherein the antisense strand contains at least one thermally destabilizing nucleotide, where at least one thermally destabilizing nucleotide is in the seed region of the antisense strand (i.e. at position 2-9 of the 5′-end of the antisense strand). For example, the thermally destabilizing nucleotide occurs between positions opposite or complimentary to positions 14-17 of the 5′-end of the sense strand, and wherein the dsRNA optionally further has at least one (e.g., one, two, three, four, five, six or all seven) of the following characteristics: (i) the antisense comprises 2, 3, 4, 5, or 6 2′-fluoro modifications; (ii) the antisense comprises 1, 2, 3, 4, or 5 phosphorothioate internucleotide linkages; (iii) the sense strand is conjugated with a ligand; (iv) the sense strand comprises 2, 3, 4, or 5 2′-fluoro modifications; (v) the sense strand comprises 1, 2, 3, 4, or 5 phosphorothioate internucleotide linkages; and (vi) the dsRNA comprises at least four 2′-fluoro modifications; and (vii) the dsRNA comprises a duplex region of 12-30 nucleotide pairs in length.

[0383] In some embodiments, the dsRNA molecule of the disclosure comprises a sense and antisense strands, wherein said dsRNA molecule comprises a sense strand having a length which is at least 25 and at most 29 nucleotides and an antisense strand having a length which is at most 30 nucleotides with the sense strand comprises a modified nucleotide that is susceptible to enzymatic degradation at position 11 from the 5′ end, wherein the 3′ end of said sense strand and the 5′ end of said antisense strand form a blunt end and said antisense strand is 1-4 nucleotides longer at its 3′ end than the sense strand, wherein the duplex region which is at least 25 nucleotides in length, and said antisense strand is sufficiently complementary to a target mRNA along at least 19 nt of said antisense strand length to reduce target gene expression when said dsRNA molecule is introduced into a mammalian cell, and wherein dicer cleavage of said dsRNA results in an siRNA comprising said 3′ end of said antisense strand, thereby reducing expression of the target gene in the mammal, wherein the antisense strand contains at least one thermally destabilizing nucleotide, where the at least one thermally destabilizing nucleotide is in the seed region of the antisense strand (i.e. at position 2-9 of the 5′-end of the antisense strand), and wherein the dsRNA optionally further has at least one (e.g., one, two, three, four, five, six or all seven) of the following characteristics: (i) the antisense comprises 2, 3, 4, 5, or 6 2′-fluoro modifications; (ii) the antisense comprises 1, 2, 3, 4, or 5 phosphorothioate internucleotide linkages; (iii) the sense strand is conjugated with a ligand; (iv) the sense strand comprises 2, 3, 4, or 5 2′-fluoro modifications; (v) the sense strand comprises 1, 2, 3, 4, or 5 phosphorothioate internucleotide linkages; and (vi) the dsRNA comprises at least four 2′-fluoro modifications; and (vii) the dsRNA has a duplex region of 12-29 nucleotide pairs in length.

[0384] In some embodiments, every nucleotide in the sense strand and antisense strand of the dsRNA molecule may be modified. Each nucleotide may be modified with the same or different modification which can include one or more alteration of one or both of the non-linking phosphate oxygens or of one or more of the linking phosphate oxygens; alteration of a constituent of the ribose sugar, e.g., of the 2′ hydroxyl on the ribose sugar; wholesale replacement of the phosphate moiety with “dephospho” linkers; modification or replacement of a naturally occurring base; and replacement or modification of the ribose-phosphate backbone.

[0385] As nucleic acids are polymers of subunits, many of the modifications occur at a position which is repeated within a nucleic acid, e.g., a modification of a base, or a phosphate moiety, or a non-linking O of a phosphate moiety. In some cases, the modification will occur at all of the subject positions in the nucleic acid but in many cases it will not. By way of example, a modification may only occur at a 3′ or 5′ terminal position, may only occur in a terminal region, e.g., at a position on a terminal nucleotide or in the last 2, 3, 4, 5, or 10 nucleotides of a strand. A modification may occur in a double strand region, a single strand region, or in both. A modification may occur only in the double strand region of an RNA or may only occur in a single strand region of an RNA. e.g., a phosphorothioate modification at a non-linking O position may only occur at one or both termini, may only occur in a terminal region, e.g., at a position on a terminal nucleotide or in the last 2, 3, 4, 5, or nucleotides of a strand, or may occur in double strand and single strand regions, particularly at termini. The 5′ end or ends can be phosphorylated.

[0386] It may be possible, e.g., to enhance stability, to include particular bases in overhangs, or to include modified nucleotides or nucleotide surrogates, in single strand overhangs, e.g., in a 5′ or 3′ overhang, or in both. E.g., it can be desirable to include purine nucleotides in overhangs. In some embodiments all or some of the bases in a 3′ or 5′ overhang may be modified, e.g., with a modification described herein. Modifications can include, e.g., the use of modifications at the 2′ position of the ribose sugar with modifications that are known in the art, e.g., the use of deoxyribonucleotides, 2′-deoxy-2′-fluoro (2′-F) or 2′-O-methyl modified instead of the ribosugar of the nucleobase, and modifications in the phosphate group, e.g., phosphorothioate modifications. Overhangs need not be homologous with the target sequence.

[0387] In some embodiments, each residue of the sense strand and antisense strand is independently modified with LNA, glycol nucleic acid (GNA), hexitol nucleic acid (HNA), 2′-methoxyethyl, 2′-O-methyl, 2′-O-allyl, 2′-C-allyl, 2′-deoxy, or 2′-fluoro. The strands can contain more than one modification. In some embodiments, each residue of the sense strand and antisense strand is independently modified with 2′-O-methyl or 2′-fluoro. It is to be understood that these modifications are in addition to the at least one thermally destabilizing modification of the duplex present in the antisense strand.

[0388] At least two different modifications are typically present on the sense strand and antisense strand. Those two modifications may be the 2′-deoxy, 2′-O-methyl or 2′-fluoro modifications, acyclic nucleotides or others. In some embodiments, the sense strand and antisense strand each comprises two differently modified nucleotides selected from 2′-O-methyl or 2′-deoxy. In some embodiments, each residue of the sense strand and antisense strand is independently modified with 2′-O-methyl nucleotide, 2′-deoxy nucleotide, 2′-deoxy-2′-fluoro nucleotide, 2′-O—N-methylacetamido (2′-O-NMA, 2′O—CH2C(O)N(Me)H) nucleotide, a 2′-O-dimethylaminoethoxyethyl (2′-O-DMAEOE) nucleotide, 2′-O-aminopropyl (2′-O-AP) nucleotide, or 2′-ara-F nucleotide. Again, it is to be understood that these modifications are in addition to the at least one thermally destabilizing modification of the duplex present in the antisense strand.

[0389] In some embodiments, the dsRNA molecule of the disclosure comprises modifications of an alternating pattern. The term “alternating motif” or “alternative pattern” as used herein refers to a motif having one or more modifications, each modification occurring on alternating nucleotides of one strand. The alternating nucleotide may refer to one per every other nucleotide or one per every three nucleotides, or a similar pattern. For example, if A, B and C each represent one type of modification to the nucleotide, the alternating motif can be “ABABABABABAB . . . ,” “AABBAABBAABB . . . ,” “AABAABAABAAB . . . ,” “AAABAAABAAAB . . . ,” “AAABBBAAABBB . . . ,” or “ABCABCABCABC . . . ,” etc.

The type of modifications contained in the alternating motif may be the same or different. For example, if A, B, C, D each represent one type of modification on the nucleotide, the alternating pattern, i.e., modifications on every other nucleotide, may be the same, but each of the sense strand or antisense strand can be selected from several possibilities of modifications within the alternating motif such as “ABABAB . . . ”, “ACACAC . . . ” “BDBDBD . . . ” or “CDCDCD . . . ,” etc.

[0390] In some embodiments, the dsRNA molecule of the disclosure comprises the modification pattern for the alternating motif on the sense strand relative to the modification pattern for the alternating motif on the antisense strand is shifted. The shift may be such that the modified group of nucleotides of the sense strand corresponds to a differently modified group of nucleotides of the antisense strand and vice versa. For example, the sense strand when paired with the antisense strand in the dsRNA duplex, the alternating motif in the sense strand may start with “ABABAB” from 5′-3′ of the strand and the alternating motif in the antisense strand may start with “BABABA” from 3′-5′ of the strand within the duplex region. As another example, the alternating motif in the sense strand may start with “AABBAABB” from 5′-3′ of the strand and the alternating motif in the antisense strand may start with “BBAABBAA” from 3′-5′ of the strand within the duplex region, so that there is a complete or partial shift of the modification patterns between the sense strand and the antisense strand.

[0391] The dsRNA molecule of the disclosure may further comprise at least one phosphorothioate or methylphosphonate internucleotide linkage. The phosphorothioate or methylphosphonate internucleotide linkage modification may occur on any nucleotide of the sense strand or antisense strand or both in any position of the strand. For instance, the internucleotide linkage modification may occur on every nucleotide on the sense strand or antisense strand; each internucleotide linkage modification may occur in an alternating pattern on the sense strand or antisense strand; or the sense strand or antisense strand comprises both internucleotide linkage modifications in an alternating pattern. The alternating pattern of the internucleotide linkage modification on the sense strand may be the same or different from the antisense strand, and the alternating pattern of the internucleotide linkage modification on the sense strand may have a shift relative to the alternating pattern of the internucleotide linkage modification on the antisense strand.

[0392] In some embodiments, the dsRNA molecule comprises the phosphorothioate or methylphosphonate internucleotide linkage modification in the overhang region. For example, the overhang region comprises two nucleotides having a phosphorothioate or methylphosphonate internucleotide linkage between the two nucleotides. Internucleotide linkage modifications also may be made to link the overhang nucleotides with the terminal paired nucleotides within duplex region. For example, at least 2, 3, 4, or all the overhang nucleotides may be linked through phosphorothioate or methylphosphonate internucleotide linkage, and optionally, there may be additional phosphorothioate or methylphosphonate internucleotide linkages linking the overhang nucleotide with a paired nucleotide that is next to the overhang nucleotide. For instance, there may be at least two phosphorothioate internucleotide linkages between the terminal three nucleotides, in which two of the three nucleotides are overhang nucleotides, and the third is a paired nucleotide next to the overhang nucleotide. In one embodiment, these terminal three nucleotides may be at the 3′-end of the antisense strand.

[0393] In some embodiments, the sense strand of the dsRNA molecule comprises 1-10 blocks of two to ten phosphorothioate or methylphosphonate internucleotide linkages separated by 1, 2, 3, 4, 5, 6, 7, 8, 9, 10, 11, 12, 13, 14, 15, or 16 phosphate internucleotide linkages, wherein one of the phosphorothioate or methylphosphonate internucleotide linkages is placed at any position in the oligonucleotide sequence and the said sense strand is paired with an antisense strand comprising any combination of phosphorothioate, methylphosphonate and phosphate internucleotide linkages or an antisense strand comprising either phosphorothioate or methylphosphonate or phosphate linkage.

[0394] In some embodiments, the antisense strand of the dsRNA molecule comprises two blocks of two phosphorothioate or methylphosphonate internucleotide linkages separated by 1, 2, 3, 4, 5, 6, 7, 8, 9, 10, 11, 12, 13, 14, 15, 16, 17, or 18 phosphate internucleotide linkages, wherein one of the phosphorothioate or methylphosphonate internucleotide linkages is placed at any position in the oligonucleotide sequence and the said antisense strand is paired with a sense strand comprising any combination of phosphorothioate, methylphosphonate and phosphate internucleotide linkages or an antisense strand comprising either phosphorothioate or methylphosphonate or phosphate linkage.

[0395] In some embodiments, the antisense strand of the dsRNA molecule comprises two blocks of three phosphorothioate or methylphosphonate internucleotide linkages separated by 1, 2, 3, 4, 5, 6, 7, 8, 9, 10, 11, 12, 13, 14, 15, or 16 phosphate internucleotide linkages, wherein one of the phosphorothioate or methylphosphonate internucleotide linkages is placed at any position in the oligonucleotide sequence and the said antisense strand is paired with a sense strand comprising any combination of phosphorothioate, methylphosphonate and phosphate internucleotide linkages or an antisense strand comprising either phosphorothioate or methylphosphonate or phosphate linkage.

[0396] In some embodiments, the antisense strand of the dsRNA molecule comprises two blocks of four phosphorothioate or methylphosphonate internucleotide linkages separated by 1, 2, 3, 4, 5, 6, 7, 8, 9, 10, 11, 12, 13, or 14 phosphate internucleotide linkages, wherein one of the phosphorothioate or methylphosphonate internucleotide linkages is placed at any position in the oligonucleotide sequence and the said antisense strand is paired with a sense strand comprising any combination of phosphorothioate, methylphosphonate and phosphate internucleotide linkages or an antisense strand comprising either phosphorothioate or methylphosphonate or phosphate linkage.

[0397] In some embodiments, the antisense strand of the dsRNA molecule comprises two blocks of five phosphorothioate or methylphosphonate internucleotide linkages separated by 1, 2, 3, 4, 5, 6, 7, 8, 9, 10, 11, or 12 phosphate internucleotide linkages, wherein one of the phosphorothioate or methylphosphonate internucleotide linkages is placed at any position in the oligonucleotide sequence and the said antisense strand is paired with a sense strand comprising any combination of phosphorothioate, methylphosphonate and phosphate internucleotide linkages or an antisense strand comprising either phosphorothioate or methylphosphonate or phosphate linkage.

[0398] In some embodiments, the antisense strand of the dsRNA molecule comprises two blocks of six phosphorothioate or methylphosphonate internucleotide linkages separated by 1, 2, 3, 4, 5, 6, 7, 8, 9, or 10 phosphate internucleotide linkages, wherein one of the phosphorothioate or methylphosphonate internucleotide linkages is placed at any position in the oligonucleotide sequence and the said antisense strand is paired with a sense strand comprising any combination of phosphorothioate, methylphosphonate and phosphate internucleotide linkages or an antisense strand comprising either phosphorothioate or methylphosphonate or phosphate linkage.

[0399] In some embodiments, the antisense strand of the dsRNA molecule comprises two blocks of seven phosphorothioate or methylphosphonate internucleotide linkages separated by 1, 2, 3, 4, 5, 6, 7, or 8 phosphate internucleotide linkages, wherein one of the phosphorothioate or methylphosphonate internucleotide linkages is placed at any position in the oligonucleotide sequence and the said antisense strand is paired with a sense strand comprising any combination of phosphorothioate, methylphosphonate and phosphate internucleotide linkages or an antisense strand comprising either phosphorothioate or methylphosphonate or phosphate linkage.

[0400] In some embodiments, the antisense strand of the dsRNA molecule comprises two blocks of eight phosphorothioate or methylphosphonate internucleotide linkages separated by 1, 2, 3, 4, 5, or 6 phosphate internucleotide linkages, wherein one of the phosphorothioate or methylphosphonate internucleotide linkages is placed at any position in the oligonucleotide sequence and the said antisense strand is paired with a sense strand comprising any combination of phosphorothioate, methylphosphonate and phosphate internucleotide linkages or an antisense strand comprising either phosphorothioate or methylphosphonate or phosphate linkage.

[0401] In some embodiments, the antisense strand of the dsRNA molecule comprises two blocks of nine phosphorothioate or methylphosphonate internucleotide linkages separated by 1, 2, 3, or 4 phosphate internucleotide linkages, wherein one of the phosphorothioate or methylphosphonate internucleotide linkages is placed at any position in the oligonucleotide sequence and the said antisense strand is paired with a sense strand comprising any combination of phosphorothioate, methylphosphonate and phosphate internucleotide linkages or an antisense strand comprising either phosphorothioate or methylphosphonate or phosphate linkage.

[0402] In some embodiments, the dsRNA molecule of the disclosure further comprises one or more phosphorothioate or methylphosphonate internucleotide linkage modification within 1-10 nucleotides of the termini position(s) of the sense or antisense strand. For example, at least 2, 3, 4, 5, 6, 7, 8, 9, or nucleotides may be linked through phosphorothioate or methylphosphonate internucleotide linkage at one end or both ends of the sense or antisense strand.

[0403] In some embodiments, the dsRNA molecule of the disclosure further comprises one or more phosphorothioate or methylphosphonate internucleotide linkage modification within 1-10 nucleotides of the internal region of the duplex of each of the sense or antisense strand. For example, at least 2, 3, 4, 5, 6, 7, 8, 9, or 10 nucleotides may be linked through phosphorothioate or methylphosphonate internucleotide linkage at position 8-16 of the duplex region counting from the 5′-end of the sense strand; the dsRNA molecule can optionally further comprise one or more phosphorothioate or methylphosphonate internucleotide linkage modification within 1-10 of the termini position(s).

[0404] In some embodiments, the dsRNA molecule of the disclosure further comprises one to five phosphorothioate or methylphosphonate internucleotide linkage modification(s) within position 1-5 and one to five phosphorothioate or methylphosphonate internucleotide linkage modification(s) within position 18-23 of the sense strand (counting from the 5′-end), and one to two phosphorothioate or methylphosphonate internucleotide linkage modification at positions 1 and 2 and one to five within positions 18-23 of the antisense strand (counting from the 5′-end).

[0405] In some embodiments, the dsRNA molecule of the disclosure further comprises one phosphorothioate internucleotide linkage modification within position 1-5 and one phosphorothioate or methylphosphonate internucleotide linkage modification within position 18-23 of the sense strand (counting from the 5′-end), and one phosphorothioate internucleotide linkage modification at positions 1 or 2 and two phosphorothioate or methylphosphonate internucleotide linkage modifications within positions 18-23 of the antisense strand (counting from the 5′-end).

[0406] In some embodiments, the dsRNA molecule of the disclosure further comprises two phosphorothioate internucleotide linkage modifications within position 1-5 and one phosphorothioate internucleotide linkage modification within position 18-23 of the sense strand (counting from the 5′-end), and one phosphorothioate internucleotide linkage modification at positions 1 and 2 and two phosphorothioate internucleotide linkage modifications within positions 18-23 of the antisense strand (counting from the 5′-end).

[0407] In some embodiments, the dsRNA molecule of the disclosure further comprises two phosphorothioate internucleotide linkage modifications within position 1-5 and two phosphorothioate internucleotide linkage modifications within position 18-23 of the sense strand (counting from the 5′-end), and one phosphorothioate internucleotide linkage modification at positions 1 and 2 and two phosphorothioate internucleotide linkage modifications within positions 18-23 of the antisense strand (counting from the 5′-end).

[0408] In some embodiments, the dsRNA molecule of the disclosure further comprises two phosphorothioate internucleotide linkage modifications within position 1-5 and two phosphorothioate internucleotide linkage modifications within position 18-23 of the sense strand (counting from the 5′-end), and one phosphorothioate internucleotide linkage modification at positions 1 and 2 and one phosphorothioate internucleotide linkage modification within positions 18-23 of the antisense strand (counting from the 5′-end).

[0409] In some embodiments, the dsRNA molecule of the disclosure further comprises one phosphorothioate internucleotide linkage modification within position 1-5 and one phosphorothioate internucleotide linkage modification within position 18-23 of the sense strand (counting from the 5′-end), and two phosphorothioate internucleotide linkage modifications at positions 1 and 2 and two phosphorothioate internucleotide linkage modifications within positions 18-23 of the antisense strand (counting from the 5′-end).

[0410] In some embodiments, the dsRNA molecule of the disclosure further comprises one phosphorothioate internucleotide linkage modification within position 1-5 and one within position 18-23 of the sense strand (counting from the 5′-end), and two phosphorothioate internucleotide linkage modification at positions 1 and 2 and one phosphorothioate internucleotide linkage modification within positions 18-23 of the antisense strand (counting from the 5′-end).

[0411] In some embodiments, the dsRNA molecule of the disclosure further comprises one phosphorothioate internucleotide linkage modification within position 1-5 (counting from the 5′-end) of the sense strand, and two phosphorothioate internucleotide linkage modifications at positions 1 and 2 and one phosphorothioate internucleotide linkage modification within positions 18-23 of the antisense strand (counting from the 5′-end).

[0412] In some embodiments, the dsRNA molecule of the disclosure further comprises two phosphorothioate internucleotide linkage modifications within position 1-5 (counting from the 5′-end) of the sense strand, and one phosphorothioate internucleotide linkage modification at positions 1 and 2 and two phosphorothioate internucleotide linkage modifications within positions 18-23 of the antisense strand (counting from the 5′-end).

[0413] In some embodiments, the dsRNA molecule of the disclosure further comprises two phosphorothioate internucleotide linkage modifications within position 1-5 and one within position 18-23 of the sense strand (counting from the 5′-end), and two phosphorothioate internucleotide linkage modifications at positions 1 and 2 and one phosphorothioate internucleotide linkage modification within positions 18-23 of the antisense strand (counting from the 5′-end).

[0414] In some embodiments, the dsRNA molecule of the disclosure further comprises two phosphorothioate internucleotide linkage modifications within position 1-5 and one phosphorothioate internucleotide linkage modification within position 18-23 of the sense strand (counting from the 5′-end), and two phosphorothioate internucleotide linkage modifications at positions 1 and 2 and two phosphorothioate internucleotide linkage modifications within positions 18-23 of the antisense strand (counting from the 5′-end).

[0415] In some embodiments, the dsRNA molecule of the disclosure further comprises two phosphorothioate internucleotide linkage modifications within position 1-5 and one phosphorothioate internucleotide linkage modification within position 18-23 of the sense strand (counting from the 5′-end), and one phosphorothioate internucleotide linkage modification at positions 1 and 2 and two phosphorothioate internucleotide linkage modifications within positions 18-23 of the antisense strand (counting from the 5′-end).

[0416] In some embodiments, the dsRNA molecule of the disclosure further comprises two phosphorothioate internucleotide linkage modifications at position 1 and 2, and two phosphorothioate internucleotide linkage modifications at position 20 and 21 of the sense strand (counting from the 5′-end), and one phosphorothioate internucleotide linkage modification at positions 1 and one at position 21 of the antisense strand (counting from the 5′-end).

[0417] In some embodiments, the dsRNA molecule of the disclosure further comprises one phosphorothioate internucleotide linkage modification at position 1, and one phosphorothioate internucleotide linkage modification at position 21 of the sense strand (counting from the 5′-end), and two phosphorothioate internucleotide linkage modifications at positions 1 and 2 and two phosphorothioate internucleotide linkage modifications at positions 20 and 21 the antisense strand (counting from the 5′-end).

[0418] In some embodiments, the dsRNA molecule of the disclosure further comprises two phosphorothioate internucleotide linkage modifications at position 1 and 2, and two phosphorothioate internucleotide linkage modifications at position 21 and 22 of the sense strand (counting from the 5′-end), and one phosphorothioate internucleotide linkage modification at positions 1 and one phosphorothioate internucleotide linkage modification at position 21 of the antisense strand (counting from the 5′-end).

[0419] In some embodiments, the dsRNA molecule of the disclosure further comprises one phosphorothioate internucleotide linkage modification at position 1, and one phosphorothioate internucleotide linkage modification at position 21 of the sense strand (counting from the 5′-end), and two phosphorothioate internucleotide linkage modifications at positions 1 and 2 and two phosphorothioate internucleotide linkage modifications at positions 21 and 22 the antisense strand (counting from the 5′-end).

[0420] In some embodiments, the dsRNA molecule of the disclosure further comprises two phosphorothioate internucleotide linkage modifications at position 1 and 2, and two phosphorothioate internucleotide linkage modifications at position 22 and 23 of the sense strand (counting from the 5′-end), and one phosphorothioate internucleotide linkage modification at positions 1 and one phosphorothioate internucleotide linkage modification at position 21 of the antisense strand (counting from the 5′-end).

[0421] In some embodiments, the dsRNA molecule of the disclosure further comprises one phosphorothioate internucleotide linkage modification at position 1, and one phosphorothioate internucleotide linkage modification at position 21 of the sense strand (counting from the 5′-end), and two phosphorothioate internucleotide linkage modifications at positions 1 and 2 and two phosphorothioate internucleotide linkage modifications at positions 23 and 23 the antisense strand (counting from the 5′-end).

[0422] In some embodiments, compound of the disclosure comprises a pattern of backbone chiral centers. In some embodiments, a common pattern of backbone chiral centers comprises at least 5 internucleotidic linkages in the Sp configuration. In some embodiments, a common pattern of backbone chiral centers comprises at least 6 internucleotidic linkages in the Sp configuration. In some embodiments, a common pattern of backbone chiral centers comprises at least 7 internucleotidic linkages in the Sp configuration. In some embodiments, a common pattern of backbone chiral centers comprises at least 8 internucleotidic linkages in the Sp configuration. In some embodiments, a common pattern of backbone chiral centers comprises at least 9 internucleotidic linkages in the Sp configuration. In some embodiments, a common pattern of backbone chiral centers comprises at least internucleotidic linkages in the Sp configuration. In some embodiments, a common pattern of backbone chiral centers comprises at least 11 internucleotidic linkages in the Sp configuration. In some embodiments, a common pattern of backbone chiral centers comprises at least 12 internucleotidic linkages in the Sp configuration. In some embodiments, a common pattern of backbone chiral centers comprises at least 13 internucleotidic linkages in the Sp configuration. In some embodiments, a common pattern of backbone chiral centers comprises at least 14 internucleotidic linkages in the Sp configuration. In some embodiments, a common pattern of backbone chiral centers comprises at least 15 internucleotidic linkages in the Sp configuration. In some embodiments, a common pattern of backbone chiral centers comprises at least 16 internucleotidic linkages in the Sp configuration. In some embodiments, a common pattern of backbone chiral centers comprises at least 17 internucleotidic linkages in the Sp configuration. In some embodiments, a common pattern of backbone chiral centers comprises at least 18 internucleotidic linkages in the Sp configuration. In some embodiments, a common pattern of backbone chiral centers comprises at least 19 internucleotidic linkages in the Sp configuration. In some embodiments, a common pattern of backbone chiral centers comprises no more than 8 internucleotidic linkages in the Rp configuration. In some embodiments, a common pattern of backbone chiral centers comprises no more than 7 internucleotidic linkages in the Rp configuration. In some embodiments, a common pattern of backbone chiral centers comprises no more than 6 internucleotidic linkages in the Rp configuration. In some embodiments, a common pattern of backbone chiral centers comprises no more than 5 internucleotidic linkages in the Rp configuration. In some embodiments, a common pattern of backbone chiral centers comprises no more than 4 internucleotidic linkages in the Rp configuration. In some embodiments, a common pattern of backbone chiral centers comprises no more than 3 internucleotidic linkages in the Rp configuration. In some embodiments, a common pattern of backbone chiral centers comprises no more than 2 internucleotidic linkages in the Rp configuration. In some embodiments, a common pattern of backbone chiral centers comprises no more than 1 internucleotidic linkages in the Rp configuration. In some embodiments, a common pattern of backbone chiral centers comprises no more than 8 internucleotidic linkages which are not chiral (as a non-limiting example, a phosphodiester). In some embodiments, a common pattern of backbone chiral centers comprises no more than 7 internucleotidic linkages which are not chiral. In some embodiments, a common pattern of backbone chiral centers comprises no more than 6 internucleotidic linkages which are not chiral. In some embodiments, a common pattern of backbone chiral centers comprises no more than 5 internucleotidic linkages which are not chiral. In some embodiments, a common pattern of backbone chiral centers comprises no more than 4 internucleotidic linkages which are not chiral. In some embodiments, a common pattern of backbone chiral centers comprises no more than 3 internucleotidic linkages which are not chiral. In some embodiments, a common pattern of backbone chiral centers comprises no more than 2 internucleotidic linkages which are not chiral. In some embodiments, a common pattern of backbone chiral centers comprises no more than 1 internucleotidic linkages which are not chiral. In some embodiments, a common pattern of backbone chiral centers comprises at least 10 internucleotidic linkages in the Sp configuration, and no more than 8 internucleotidic linkages which are not chiral. In some embodiments, a common pattern of backbone chiral centers comprises at least 11 internucleotidic linkages in the Sp configuration, and no more than 7 internucleotidic linkages which are not chiral. In some embodiments, a common pattern of backbone chiral centers comprises at least 12 internucleotidic linkages in the Sp configuration, and no more than 6 internucleotidic linkages which are not chiral. In some embodiments, a common pattern of backbone chiral centers comprises at least 13 internucleotidic linkages in the Sp configuration, and no more than 6 internucleotidic linkages which are not chiral. In some embodiments, a common pattern of backbone chiral centers comprises at least 14 internucleotidic linkages in the Sp configuration, and no more than 5 internucleotidic linkages which are not chiral. In some embodiments, a common pattern of backbone chiral centers comprises at least 15 internucleotidic linkages in the Sp configuration, and no more than 4 internucleotidic linkages which are not chiral. In some embodiments, the internucleotidic linkages in the Sp configuration are optionally contiguous or not contiguous. In some embodiments, the internucleotidic linkages in the Rp configuration are optionally contiguous or not contiguous. In some embodiments, the internucleotidic linkages which are not chiral are optionally contiguous or not contiguous.

[0423] In some embodiments, compound of the disclosure comprises a block is a stereochemistry block. In some embodiments, a block is an Rp block in that each internucleotidic linkage of the block is Rp. In some embodiments, a 5′-block is an Rp block. In some embodiments, a 3′-block is an Rp block. In some embodiments, a block is an Sp block in that each internucleotidic linkage of the block is Sp. In some embodiments, a 5′-block is an Sp block. In some embodiments, a 3′-block is an Sp block. In some embodiments, provided oligonucleotides comprise both Rp and Sp blocks. In some embodiments, provided oligonucleotides comprise one or more Rp but no Sp blocks. In some embodiments, provided oligonucleotides comprise one or more Sp but no Rp blocks. In some embodiments, provided oligonucleotides comprise one or more PO blocks wherein each internucleotidic linkage in a natural phosphate linkage.

[0424] In some embodiments, compound of the disclosure comprises a 5′-block is an Sp block wherein each sugar moiety comprises a 2′-F modification. In some embodiments, a 5′-block is an Sp block wherein each of internucleotidic linkage is a modified internucleotidic linkage and each sugar moiety comprises a 2′-F modification. In some embodiments, a 5′-block is an Sp block wherein each of internucleotidic linkage is a phosphorothioate linkage and each sugar moiety comprises a 2′-F modification. In some embodiments, a 5′-block comprises 4 or more nucleoside units. In some embodiments, a 5′-block comprises 5 or more nucleoside units. In some embodiments, a 5′-block comprises 6 or more nucleoside units. In some embodiments, a 5′-block comprises 7 or more nucleoside units. In some embodiments, a 3′-block is an Sp block wherein each sugar moiety comprises a 2′-F modification. In some embodiments, a 3′-block is an Sp block wherein each of internucleotidic linkage is a modified internucleotidic linkage and each sugar moiety comprises a 2′-F modification. In some embodiments, a 3′-block is an Sp block wherein each of internucleotidic linkage is a phosphorothioate linkage and each sugar moiety comprises a 2′-F modification. In some embodiments, a 3′-block comprises 4 or more nucleoside units. In some embodiments, a 3′-block comprises 5 or more nucleoside units. In some embodiments, a 3′-block comprises 6 or more nucleoside units. In some embodiments, a 3′-block comprises 7 or more nucleoside units.

[0425] In some embodiments, compound of the disclosure comprises a type of nucleoside in a region or an oligonucleotide is followed by a specific type of internucleotidic linkage, e.g., natural phosphate linkage, modified internucleotidic linkage, Rp chiral internucleotidic linkage, Sp chiral internucleotidic linkage, etc. In some embodiments, A is followed by Sp. In some embodiments, A is followed by Rp. In some embodiments, A is followed by natural phosphate linkage (PO). In some embodiments, U is followed by Sp. In some embodiments, U is followed by Rp. In some embodiments, U is followed by natural phosphate linkage (PO). In some embodiments, C is followed by Sp. In some embodiments, C is followed by Rp. In some embodiments, C is followed by natural phosphate linkage (PO). In some embodiments, G is followed by Sp. In some embodiments, G is followed by Rp. In some embodiments, G is followed by natural phosphate linkage (PO). In some embodiments, C and U are followed by Sp. In some embodiments, C and U are followed by Rp. In some embodiments, C and U are followed by natural phosphate linkage (PO). In some embodiments, A and G are followed by Sp. In some embodiments, A and G are followed by Rp.

[0426] In some embodiments, the antisense strand comprises phosphorothioate internucleotide linkages between nucleotide positions 21 and 22, and between nucleotide positions 22 and 23, wherein the antisense strand contains at least one thermally destabilizing modification of the duplex located in the seed region of the antisense strand (i.e., at position 2-9 of the 5′-end of the antisense strand), and wherein the dsRNA optionally further has at least one (e.g., one, two, three, four, five, six, seven or all eight) of the following characteristics: (i) the antisense comprises 2, 3, 4, 5, or 6 2′-fluoro modifications; (ii) the antisense comprises 3, 4, or 5 phosphorothioate internucleotide linkages; (iii) the sense strand is conjugated with a ligand; (iv) the sense strand comprises 2, 3, 4 or 5 2′-fluoro modifications; (v) the sense strand comprises 1, 2, 3, 4, or 5 phosphorothioate internucleotide linkages; (vi) the dsRNA comprises at least four 2′-fluoro modifications; (vii) the dsRNA comprises a duplex region of 12-40 nucleotide pairs in length; and (viii) the dsRNA has a blunt end at 5′-end of the antisense strand.

[0427] In some embodiments, the antisense strand comprises phosphorothioate internucleotide linkages between nucleotide positions 1 and 2, between nucleotide positions 2 and 3, between nucleotide positions 21 and 22, and between nucleotide positions 22 and 23, wherein the antisense strand contains at least one thermally destabilizing modification of the duplex located in the seed region of the antisense strand (i.e., at position 2-9 of the 5′-end of the antisense strand), and wherein the dsRNA optionally further has at least one (e.g., one, two, three, four, five, six, seven or all eight) of the following characteristics: (i) the antisense comprises 2, 3, 4, 5, or 6 2′-fluoro modifications; (ii) the sense strand is conjugated with a ligand; (iii) the sense strand comprises 2, 3, 4 or 5 2′-fluoro modifications; (iv) the sense strand comprises 1, 2, 3, 4, or 5 phosphorothioate internucleotide linkages; (v) the dsRNA comprises at least four 2′-fluoro modifications; (vi) the dsRNA comprises a duplex region of 12-40 nucleotide pairs in length; (vii) the dsRNA comprises a duplex region of 12-40 nucleotide pairs in length; and (viii) the dsRNA has a blunt end at 5′-end of the antisense strand.

[0428] In some embodiments, the sense strand comprises phosphorothioate internucleotide linkages between nucleotide positions 1 and 2, and between nucleotide positions 2 and 3, wherein the antisense strand contains at least one thermally destabilizing modification of the duplex located in the seed region of the antisense strand (i.e., at position 2-9 of the 5′-end of the antisense strand), and wherein the dsRNA optionally further has at least one (e.g., one, two, three, four, five, six, seven or all eight) of the following characteristics: (i) the antisense comprises 2, 3, 4, 5, or 6 2′-fluoro modifications; (ii) the antisense comprises 1, 2, 3, 4, or 5 phosphorothioate internucleotide linkages; (iii) the sense strand is conjugated with a ligand; (iv) the sense strand comprises 2, 3, 4 or 5 2′-fluoro modifications; (v) the sense strand comprises 3, 4 or 5 phosphorothioate internucleotide linkages; (vi) the dsRNA comprises at least four 2′-fluoro modifications; (vii) the dsRNA comprises a duplex region of 12-40 nucleotide pairs in length; and (viii) the dsRNA has a blunt end at 5′-end of the antisense strand.

[0429] In some embodiments, the sense strand comprises phosphorothioate internucleotide linkages between nucleotide positions 1 and 2, and between nucleotide positions 2 and 3, the antisense strand comprises phosphorothioate internucleotide linkages between nucleotide positions 1 and 2, between nucleotide positions 2 and 3, between nucleotide positions 21 and 22, and between nucleotide positions 22 and 23, wherein the antisense strand contains at least one thermally destabilizing modification of the duplex located in the seed region of the antisense strand (i.e., at position 2-9 of the 5′-end of the antisense strand), and wherein the dsRNA optionally further has at least one (e.g., one, two, three, four, five, six or all seven) of the following characteristics: (i) the antisense comprises 2, 3, 4, 5 or 6 2′-fluoro modifications; (ii) the sense strand is conjugated with a ligand; (iii) the sense strand comprises 2, 3, 4 or 5 2′-fluoro modifications; (iv) the sense strand comprises 3, 4 or 5 phosphorothioate internucleotide linkages; (v) the dsRNA comprises at least four 2′-fluoro modifications; (vi) the dsRNA comprises a duplex region of 12-40 nucleotide pairs in length; and (vii) the dsRNA has a blunt end at 5′-end of the antisense strand.

[0430] In some embodiments, the dsRNA molecule of the disclosure comprises mismatch(es) with the target, within the duplex, or combinations thereof. The mismatch can occur in the overhang region or the duplex region. The base pair can be ranked on the basis of their propensity to promote dissociation or melting (e.g., on the free energy of association or dissociation of a particular pairing, the simplest approach is to examine the pairs on an individual pair basis, though next neighbor or similar analysis can also be used). In terms of promoting dissociation: A:U is preferred over G:C; G:U is preferred over G:C; and I:C is preferred over G:C (I=inosine). Mismatches, e.g., non-canonical or other than canonical pairings (as described elsewhere herein) are preferred over canonical (A:T, A:U, G:C) pairings; and pairings which include a universal base are preferred over canonical pairings.

[0431] In some embodiments, the dsRNA molecule of the disclosure comprises at least one of the first 1, 2, 3, 4, or 5 base pairs within the duplex regions from the 5′-end of the antisense strand can be chosen independently from the group of: A:U, G:U, I:C, and mismatched pairs, e.g., non-canonical or other than canonical pairings or pairings which include a universal base, to promote the dissociation of the antisense strand at the 5′-end of the duplex.

[0432] In some embodiments, the nucleotide at the 1 position within the duplex region from the 5′-end in the antisense strand is selected from the group consisting of A, dA, dU, U, and dT. Alternatively, at least one of the first 1, 2 or 3 base pair within the duplex region from the 5′-end of the antisense strand is an AU base pair. For example, the first base pair within the duplex region from the 5′-end of the antisense strand is an AU base pair.

[0433] It was found that introducing 4′-modified or 5′-modified nucleotide to the 3′-end of a phosphodiester (PO), phosphorothioate (PS), or phosphorodithioate (PS2) linkage of a nucleotide at any position of single stranded or double stranded oligonucleotide can exert steric effect to the internucleotide linkage and, hence, protecting or stabilizing it against nucleases.

[0434] In some embodiments, 5′-modified nucleotide is introduced at the 3′-end of a dinucleotide at any position of single stranded or double stranded siRNA. For instance, a 5′-alkylated nucleotide may be introduced at the 3′-end of a dinucleotide at any position of single stranded or double stranded siRNA. The alkyl group at the 5′ position of the ribose sugar can be racemic or chirally pure R or S isomer. An exemplary 5′-alkylated nucleotide is 5′-methyl nucleotide. The 5′-methyl can be either racemic or chirally pure R or S isomer.

[0435] In some embodiments, 4′-modified nucleotide is introduced at the 3′-end of a dinucleotide at any position of single stranded or double stranded siRNA. For instance, a 4′-alkylated nucleotide may be introduced at the 3′-end of a dinucleotide at any position of single stranded or double stranded siRNA. The alkyl group at the 4′ position of the ribose sugar can be racemic or chirally pure R or S isomer. An exemplary 4′-alkylated nucleotide is 4′-methyl nucleotide. The 4′-methyl can be either racemic or chirally pure R or S isomer. Alternatively, a 4′-O-alkylated nucleotide may be introduced at the 3′-end of a dinucleotide at any position of single stranded or double stranded siRNA. The 4′-O-alkyl of the ribose sugar can be racemic or chirally pure R or S isomer. An exemplary 4′-O-alkylated nucleotide is 4′-O-methyl nucleotide. The 4′-O-methyl can be either racemic or chirally pure R or S isomer.

[0436] In some embodiments, 5′-alkylated nucleotide is introduced at any position on the sense strand or antisense strand of a dsRNA, and such modification maintains or improves potency of the dsRNA. The 5′-alkyl can be either racemic or chirally pure R or S isomer. An exemplary 5′-alkylated nucleotide is 5′-methyl nucleotide. The 5′-methyl can be either racemic or chirally pure R or S isomer.

[0437] In some embodiments, 4′-alkylated nucleotide is introduced at any position on the sense strand or antisense strand of a dsRNA, and such modification maintains or improves potency of the dsRNA. The 4′-alkyl can be either racemic or chirally pure R or S isomer. An exemplary 4′-alkylated nucleotide is 4′-methyl nucleotide. The 4′-methyl can be either racemic or chirally pure R or S isomer.

[0438] In some embodiments, 4′-O-alkylated nucleotide is introduced at any position on the sense strand or antisense strand of a dsRNA, and such modification maintains or improves potency of the dsRNA. The 5′-alkyl can be either racemic or chirally pure R or S isomer. An exemplary 4′-O-alkylated nucleotide is 4′-O-methyl nucleotide. The 4′-O-methyl can be either racemic or chirally pure R or S isomer.

[0439] In some embodiments, the dsRNA molecule of the disclosure can comprise 2′-5′ linkages (with 2′-H, 2′-OH and 2′-OMe and with P═O or P═S). For example, the 2′-5′ linkages modifications can be used to promote nuclease resistance or to inhibit binding of the sense to the antisense strand, or can be used at the 5′ end of the sense strand to avoid sense strand activation by RISC.

[0440] In another embodiment, the dsRNA molecule of the disclosure can comprise L sugars (e.g., L ribose, L-arabinose with 2′-H, 2′-OH and 2′-OMe). For example, these L sugars modifications can be used to promote nuclease resistance or to inhibit binding of the sense to the antisense strand, or can be used at the 5′ end of the sense strand to avoid sense strand activation by RISC.

[0441] Various publications describe multimeric siRNA which can all be used with the dsRNA of the disclosure. Such publications include WO2007/091269, U.S. Pat. No. 7,858,769, WO2010/141511, WO2007/117686, WO2009/014887, and WO2011/031520 which are hereby incorporated by their entirely.

[0442] As described in more detail below, the RNAi agent that contains conjugations of one or more carbohydrate moieties to an RNAi agent can optimize one or more properties of the RNAi agent. In many cases, the carbohydrate moiety will be attached to a modified subunit of the RNAi agent. For example, the ribose sugar of one or more ribonucleotide subunits of a dsRNA agent can be replaced with another moiety, e.g., a non-carbohydrate (such as cyclic) carrier to which is attached a carbohydrate ligand. A ribonucleotide subunit in which the ribose sugar of the subunit has been so replaced is referred to herein as a ribose replacement modification subunit (RRMS). A cyclic carrier may be a carbocyclic ring system, i.e., all ring atoms are carbon atoms, or a heterocyclic ring system, i.e., one or more ring atoms may be a heteroatom, e.g., nitrogen, oxygen, sulfur. The cyclic carrier may be a monocyclic ring system, or may contain two or more rings, e.g. fused rings. The cyclic carrier may be a fully saturated ring system, or it may contain one or more double bonds.

[0443] The ligand may be attached to the polynucleotide via a carrier. The carriers include (i) at least one “backbone attachment point,” such as two “backbone attachment points” and (ii) at least one “tethering attachment point.” A “backbone attachment point” as used herein refers to a functional group, e.g. a hydroxyl group, or generally, a bond available for, and that is suitable for incorporation of the carrier into the backbone, e.g., the phosphate, or modified phosphate, e.g., sulfur containing, backbone, of a ribonucleic acid. A “tethering attachment point” (TAP) in some embodiments refers to a constituent ring atom of the cyclic carrier, e.g., a carbon atom or a heteroatom (distinct from an atom which provides a backbone attachment point), that connects a selected moiety. The moiety can be, e.g., a carbohydrate, e.g. monosaccharide, disaccharide, trisaccharide, tetrasaccharide, oligosaccharide and polysaccharide. Optionally, the selected moiety is connected by an intervening tether to the cyclic carrier. Thus, the cyclic carrier will often include a functional group, e.g., an amino group, or generally, provide a bond, that is suitable for incorporation or tethering of another chemical entity, e.g., a ligand to the constituent ring.

[0444] The RNAi agents may be conjugated to a ligand via a carrier, wherein the carrier can be cyclic group or acyclic group. In some embodiments, the cyclic group is selected from pyrrolidinyl, pyrazolinyl, pyrazolidinyl, imidazolinyl, imidazolidinyl, piperidinyl, piperazinyl, [1,3]dioxolane, oxazolidinyl, isoxazolidinyl, morpholinyl, thiazolidinyl, isothiazolidinyl, quinoxalinyl, pyridazinonyl, tetrahydrofuryl and decalin. In some embodiments, the acyclic group is selected from serinol backbone or diethanolamine backbone.

[0445] In certain specific embodiments, the RNAi agent for use in the methods of the disclosure is an agent selected from the group of agents listed in any one of Tables 2, 3, 5, and 6. These agents may further comprise a ligand, such as one or more lipophilic moieties, one or more GalNAc derivatives, or both of one of more lipophilic moieties and one or more GalNAc derivatives.

### IV. iRNAs Conjugated to Ligands

[0446] Another modification of the RNA of an iRNA of the invention involves chemically linking to the iRNA one or more ligands, moieties or conjugates that enhance the activity, cellular distribution or cellular uptake of the iRNA into a cell. Such moieties include but are not limited to lipid moieties such as a cholesterol moiety (Letsinger et al., Proc. Natl. Acid. Sci. USA, 1989, 86: 6553-6556), cholic acid (Manoharan et al., Biorg. Med. Chem. Let., 1994, 4:1053-1060), a thioether, e.g., beryl-S-tritylthiol (Manoharan et al., Ann. N. Y. Acad. Sci., 1992, 660:306-309; Manoharan et al., Biorg. Med. Chem. Let., 1993, 3:2765-2770), a thiocholesterol (Oberhauser et al., Nucl. Acids Res., 1992, 20:533-538), an aliphatic chain, e.g., dodecandiol or undecyl residues (Saison-Behmoaras et al., EMBO J, 1991, 10:1111-1118; Kabanov et al., FEBS Lett., 1990, 259:327-330; Svinarchuk et al., Biochimie, 1993, 75:49-54), a phospholipid, e.g., di-hexadecyl-rac-glycerol or triethyl-ammonium 1,2-di-O-hexadecyl-rac-glycero-3-phosphonate (Manoharan et al., Tetrahedron Lett., 1995, 36:3651-3654; Shea et al., Nucl. Acids Res., 1990, 18:3777-3783), a polyamine or a polyethylene glycol chain (Manoharan et al., Nucleosides & Nucleotides, 1995, 14:969-973), or adamantane acetic acid (Manoharan et al., Tetrahedron Lett., 1995, 36:3651-3654), a palmityl moiety (Mishra et al., Biochim. Biophys. Acta, 1995, 1264:229-237), or an octadecylamine or hexylamino-carbonyloxycholesterol moiety (Crooke et al., J. Pharmacol. Exp. Ther., 1996, 277:923-937).

[0447] In certain embodiments, a ligand alters the distribution, targeting or lifetime of an iRNA agent into which it is incorporated. In some embodiments, a ligand provides an enhanced affinity for a selected target, e.g., molecule, cell or cell type, compartment, e.g., a cellular or organ compartment, tissue, organ or region of the body, as, e.g., compared to a species absent such a ligand. Typical ligands will not take part in duplex pairing in a duplexed nucleic acid.

[0448] Ligands can include a naturally occurring substance, such as a protein (e.g., human serum albumin (HSA), low-density lipoprotein (LDL), or globulin); carbohydrate (e.g., a dextran, pullulan, chitin, chitosan, inulin, cyclodextrin or hyaluronic acid); or a lipid. The ligand may also be a recombinant or synthetic molecule, such as a synthetic polymer, e.g., a synthetic polyamino acid. Examples of polyamino acids include polyamino acid is a polylysine (PLL), poly L-aspartic acid, poly L-glutamic acid, styrene-maleic acid anhydride copolymer, poly(L-lactide-co-glycolied) copolymer, divinyl ether-maleic anhydride copolymer, N-(2-hydroxypropyl)methacrylamide copolymer (HMPA), polyethylene glycol (PEG), polyvinyl alcohol (PVA), polyurethane, poly(2-ethylacryllic acid), N-isopropylacrylamide polymers, or polyphosphazine. Example of polyamines include: polyethylenimine, polylysine (PLL), spermine, spermidine, polyamine, pseudopeptide-polyamine, peptidomimetic polyamine, dendrimer polyamine, arginine, amidine, protamine, cationic lipid, cationic porphyrin, quaternary salt of a polyamine, or an α helical peptide.

[0449] Ligands can also include targeting groups, e.g., a cell or tissue targeting agent, e.g., a lectin, glycoprotein, lipid or protein, e.g., an antibody, that binds to a specified cell type such as a kidney cell. A targeting group can be a thyrotropin, melanotropin, lectin, glycoprotein, surfactant protein A, Mucin carbohydrate, multivalent lactose, multivalent galactose, N-acetyl-galactosamine, N-acetyl-glucosamine multivalent mannose, multivalent fucose, glycosylated polyaminoacids, multivalent galactose, transferrin, bisphosphonate, polyglutamate, polyaspartate, a lipid, cholesterol, a steroid, bile acid, folate, vitamin B12, biotin, or an RGD peptide or RGD peptide mimetic. In certain embodiments, the ligand is a multivalent galactose, e.g., an N-acetyl-galactosamine.

[0450] Other examples of ligands include dyes, intercalating agents (e.g. acridines), cross-linkers (e.g. psoralene, mitomycin C), porphyrins (TPPC4, texaphyrin, Sapphyrin), polycyclic aromatic hydrocarbons (e.g., phenazine, dihydrophenazine), artificial endonucleases (e.g. EDTA), lipophilic molecules, e.g., cholesterol, cholic acid, adamantane acetic acid, 1-pyrene butyric acid, dihydrotestosterone, 1,3-Bis-O(hexadecyl)glycerol, geranyloxyhexyl group, hexadecylglycerol, borneol, menthol, 1,3-propanediol, heptadecyl group, palmitic acid, myristic acid, O3-(oleoyl)lithocholic acid, 03-(oleoyl)cholenic acid, dimethoxytrityl, or phenoxazine) and peptide conjugates (e.g., antennapedia peptide, Tat peptide), alkylating agents, phosphate, amino, mercapto, PEG (e.g., PEG-40K), MPEG, [MPEG]₂, polyamino, alkyl, substituted alkyl, radiolabeled markers, enzymes, haptens (e.g. biotin), transport/absorption facilitators (e.g., aspirin, vitamin E, folic acid), synthetic ribonucleases (e.g., imidazole, bisimidazole, histamine, imidazole clusters, acridine-imidazole conjugates, Eu3+ complexes of tetraazamacrocycles), dinitrophenyl, HRP, or AP.

[0451] Ligands can be proteins, e.g., glycoproteins, or peptides, e.g., molecules having a specific affinity for a co-ligand, or antibodies e.g., an antibody, that binds to a specified cell type such as a cancer cell, endothelial cell, or bone cell. Ligands may also include hormones and hormone receptors. They can also include non-peptidic species, such as lipids, lectins, carbohydrates, vitamins, cofactors, multivalent lactose, multivalent galactose, N-acetyl-galactosamine, N-acetyl-glucosamine multivalent mannose, or multivalent fucose. The ligand can be, for example, a lipopolysaccharide, an activator of p38 MAP kinase, or an activator of NF-κB.

[0452] The ligand can be a substance, e.g., a drug, which can increase the uptake of the iRNA agent into the cell, for example, by disrupting the cell's cytoskeleton, e.g., by disrupting the cell's microtubules, microfilaments, or intermediate filaments. The drug can be, for example, taxon, vincristine, vinblastine, cytochalasin, nocodazole, japlakinolide, latrunculin A, phalloidin, swinholide A, indanocine, or myoservin.

[0453] In some embodiments, a ligand attached to an iRNA as described herein acts as a pharmacokinetic modulator (PK modulator). PK modulators include lipophiles, bile acids, steroids, phospholipid analogues, peptides, protein binding agents, PEG, vitamins etc. Exemplary PK modulators include, but are not limited to, cholesterol, fatty acids, cholic acid, lithocholic acid, dialkylglycerides, diacylglyceride, phospholipids, sphingolipids, naproxen, ibuprofen, vitamin E, biotin etc. Oligonucleotides that comprise a number of phosphorothioate linkages are also known to bind to serum protein, thus short oligonucleotides, e.g., oligonucleotides of about 5 bases, 10 bases, bases or 20 bases, comprising multiple of phosphorothioate linkages in the backbone are also amenable to the present invention as ligands (e.g. as PK modulating ligands). In addition, aptamers that bind serum components (e.g. serum proteins) are also suitable for use as PK modulating ligands in the embodiments described herein.

[0454] Ligand-conjugated iRNAs of the invention may be synthesized by the use of an oligonucleotide that bears a pendant reactive functionality, such as that derived from the attachment of a linking molecule onto the oligonucleotide (described below). This reactive oligonucleotide may be reacted directly with commercially-available ligands, ligands that are synthesized bearing any of a variety of protecting groups, or ligands that have a linking moiety attached thereto.

[0455] The oligonucleotides used in the conjugates of the present invention may be conveniently and routinely made through the well-known technique of solid-phase synthesis. Equipment for such synthesis is sold by several vendors including, for example, Applied Biosystems® (Foster City, Calif.). Any other means for such synthesis known in the art may additionally or alternatively be employed. It is also known to use similar techniques to prepare other oligonucleotides, such as the phosphorothioates and alkylated derivatives.

[0456] In the ligand-conjugated oligonucleotides and ligand-molecule bearing sequence-specific linked nucleosides of the present invention, the oligonucleotides and oligonucleosides may be assembled on a suitable DNA synthesizer utilizing standard nucleotide or nucleoside precursors, or nucleotide or nucleoside conjugate precursors that already bear the linking moiety, ligand-nucleotide or nucleoside-conjugate precursors that already bear the ligand molecule, or non-nucleoside ligand-bearing building blocks.

[0457] When using nucleotide-conjugate precursors that already bear a linking moiety, the synthesis of the sequence-specific linked nucleosides is typically completed, and the ligand molecule is then reacted with the linking moiety to form the ligand-conjugated oligonucleotide. In some embodiments, the oligonucleotides or linked nucleosides of the present invention are synthesized by an automated synthesizer using phosphoramidites derived from ligand-nucleoside conjugates in addition to the standard phosphoramidites and non-standard phosphoramidites that are commercially available and routinely used in oligonucleotide synthesis.

[0458] A. Lipid Conjugates

[0459] In certain embodiments, the ligand or conjugate is a lipid or lipid-based molecule. Such a lipid or lipid-based molecule can typically bind a serum protein, such as human serum albumin (HSA). An HSA binding ligand allows for distribution of the conjugate to a target tissue, e.g., a non-kidney target tissue of the body. For example, the target tissue can be the liver, including parenchymal cells of the liver. Other molecules that can bind HSA can also be used as ligands. For example, naproxen or aspirin can be used. A lipid or lipid-based ligand can (a) increase resistance to degradation of the conjugate, (b) increase targeting or transport into a target cell or cell membrane, or (c) can be used to adjust binding to a serum protein, e.g., HSA.

[0460] A lipid-based ligand can be used to modulate, e.g., control (e.g., inhibit) the binding of the conjugate to a target tissue. For example, a lipid or lipid-based ligand that binds to HSA more strongly will be less likely to be targeted to the kidney and therefore less likely to be cleared from the body. A lipid or lipid-based ligand that binds to HSA less strongly can be used to target the conjugate to the kidney.

[0461] In certain embodiments, the lipid-based ligand binds HSA. For example, the ligand can bind HSA with a sufficient affinity such that distribution of the conjugate to a non-kidney tissue is enhanced. However, the affinity is typically not so strong that the HSA-ligand binding cannot be reversed.

[0462] In certain embodiments, the lipid-based ligand binds HSA weakly or not at all, such that distribution of the conjugate to the kidney is enhanced. Other moieties that target to kidney cells can also be used in place of or in addition to the lipid-based ligand.

[0463] In another aspect, the ligand is a moiety, e.g., a vitamin, which is taken up by a target cell, e.g., a proliferating cell. These are particularly useful for treating disorders characterized by unwanted cell proliferation, e.g., of the malignant or non-malignant type, e.g., cancer cells. Exemplary vitamins include vitamin A, E, and K. Other exemplary vitamins include are B vitamin, e.g., folic acid, B12, riboflavin, biotin, pyridoxal or other vitamins or nutrients taken up by cancer cells. Also included are HSA and low density lipoprotein (LDL).

[0464] B. Cell Permeation Agents

[0465] In another aspect, the ligand is a cell-permeation agent, such as a helical cell-permeation agent. In certain embodiments, the agent is amphipathic. An exemplary agent is a peptide such as tat or antennopedia. If the agent is a peptide, it can be modified, including a peptidylmimetic, invertomers, non-peptide or pseudo-peptide linkages, and use of D-amino acids. The helical agent is typically an α-helical agent and can have a lipophilic and a lipophobic phase.

[0466] The ligand can be a peptide or peptidomimetic. A peptidomimetic (also referred to herein as an oligopeptidomimetic) is a molecule capable of folding into a defined three-dimensional structure similar to a natural peptide. The attachment of peptide and peptidomimetics to iRNA agents can affect pharmacokinetic distribution of the iRNA, such as by enhancing cellular recognition and absorption. The peptide or peptidomimetic moiety can be about 5-50 amino acids long, e.g., about 5, 10, 15, 20, 25, 30, 35, 40, 45, or 50 amino acids long.

[0467] A peptide or peptidomimetic can be, for example, a cell permeation peptide, cationic peptide, amphipathic peptide, or hydrophobic peptide (e.g., consisting primarily of Tyr, Trp, or Phe). The peptide moiety can be a dendrimer peptide, constrained peptide or crosslinked peptide. In another alternative, the peptide moiety can include a hydrophobic membrane translocation sequence (MTS). An exemplary hydrophobic MTS-containing peptide is RFGF having the amino acid sequence AAVALLPAVLLALLAP (SEQ ID NO:9). An RFGF analogue (e.g., amino acid sequence AALLPVLLAAP (SEQ ID NO:10)) containing a hydrophobic MTS can also be a targeting moiety. The peptide moiety can be a “delivery” peptide, which can carry large polar molecules including peptides, oligonucleotides, and protein across cell membranes. For example, sequences from the HIV Tat protein (GRKKRRQRRRPPQ (SEQ ID NO:11)) and the Drosophila antennapedia protein (RQIKIWFQNRRMKWKK (SEQ ID NO:12)) have been found to be capable of functioning as delivery peptides. A peptide or peptidomimetic can be encoded by a random sequence of DNA, such as a peptide identified from a phage-display library, or one-bead-one-compound (OBOC) combinatorial library (Lam et al., Nature, 354:82-84, 1991). Typically, the peptide or peptidomimetic tethered to a dsRNA agent via an incorporated monomer unit is a cell targeting peptide such as an arginine-glycine-aspartic acid (RGD)-peptide, or RGD mimic. A peptide moiety can range in length from about 5 amino acids to about 40 amino acids. The peptide moieties can have a structural modification, such as to increase stability or direct conformational properties. Any of the structural modifications described below can be utilized.

[0468] An RGD peptide for use in the compositions and methods of the invention may be linear or cyclic, and may be modified, e.g., glycosylated or methylated, to facilitate targeting to a specific tissue(s). RGD-containing peptides and peptidiomimemtics may include D-amino acids, as well as synthetic RGD mimics. In addition to RGD, one can use other moieties that target the integrin ligand, such as PECAM-1 or VEGF.

[0469] An RGD peptide moiety can be used to target a particular cell type, e.g., a tumor cell, such as an endothelial tumor cell or a breast cancer tumor cell (Zitzmann et al., Cancer Res., 62:5139-43, 2002). An RGD peptide can facilitate targeting of an dsRNA agent to tumors of a variety of other tissues, including the lung, kidney, spleen, or liver (Aoki et al., Cancer Gene Therapy 8:783-787, 2001). Typically, the RGD peptide will facilitate targeting of an iRNA agent to the kidney. The RGD peptide can be linear or cyclic, and can be modified, e.g., glycosylated or methylated to facilitate targeting to specific tissues. For example, a glycosylated RGD peptide can deliver an iRNA agent to a tumor cell expressing αvβ₃ (Haubner et al., Jour. Nucl. Med., 42:326-336, 2001).

[0470] A “cell permeation peptide” is capable of permeating a cell, e.g., a microbial cell, such as a bacterial or fungal cell, or a mammalian cell, such as a human cell. A microbial cell-permeating peptide can be, for example, an α-helical linear peptide (e.g., LL-37 or Ceropin P1), a disulfide bond-containing peptide (e.g., α-defensin, β-defensin or bactenecin), or a peptide containing only one or two dominating amino acids (e.g., PR-39 or indolicidin). A cell permeation peptide can also include a nuclear localization signal (NLS). For example, a cell permeation peptide can be a bipartite amphipathic peptide, such as MPG, which is derived from the fusion peptide domain of HIV-1 gp4l and the NLS of SV40 large T antigen (Simeoni et al., Nucl. Acids Res. 31:2717-2724, 2003).

[0471] C. Carbohydrate Conjugates

[0472] In some embodiments of the compositions and methods of the invention, an iRNA further comprises a carbohydrate. The carbohydrate conjugated iRNA are advantageous for the in vivo delivery of nucleic acids, as well as compositions suitable for in vivo therapeutic use, as described herein. As used herein, “carbohydrate” refers to a compound which is either a carbohydrate per se made up of one or more monosaccharide units having at least 6 carbon atoms (which can be linear, branched or cyclic) with an oxygen, nitrogen or sulfur atom bonded to each carbon atom; or a compound having as a part thereof a carbohydrate moiety made up of one or more monosaccharide units each having at least six carbon atoms (which can be linear, branched or cyclic), with an oxygen, nitrogen or sulfur atom bonded to each carbon atom. Representative carbohydrates include the sugars (mono-, di-, tri- and oligosaccharides containing from about 4, 5, 6, 7, 8, or 9 monosaccharide units), and polysaccharides such as starches, glycogen, cellulose and polysaccharide gums. Specific monosaccharides include C5 and above (e.g., C5, C6, C7, or C8) sugars; di- and tri-saccharides include sugars having two or three monosaccharide units (e.g., C5, C6, C7, or C8).

[0473] In certain embodiments, a carbohydrate conjugate comprises a monosaccharide.

[0474] In certain embodiments, the monosaccharide is an N-acetylgalactosamine (GalNAc). GalNAc conjugates, which comprise one or more N-acetylgalactosamine (GalNAc) derivatives, are described, for example, in U.S. Pat. No. 8,106,022, the entire content of which is hereby incorporated herein by reference. In some embodiments, the GalNAc conjugate serves as a ligand that targets the iRNA to particular cells. In some embodiments, the GalNAc conjugate targets the iRNA to liver cells, e.g., by serving as a ligand for the asialoglycoprotein receptor of liver cells (e.g., hepatocytes).

[0475] In some embodiments, the carbohydrate conjugate comprises one or more GalNAc derivatives. The GalNAc derivatives may be attached via a linker, e.g., a bivalent or trivalent branched linker. In some embodiments the GalNAc conjugate is conjugated to the 3′ end of the sense strand. In some embodiments, the GalNAc conjugate is conjugated to the iRNA agent (e.g., to the 3′ end of the sense strand) via a linker, e.g., a linker as described herein. In some embodiments the GalNAc conjugate is conjugated to the 5′ end of the sense strand. In some embodiments, the GalNAc conjugate is conjugated to the iRNA agent (e.g., to the 5′ end of the sense strand) via a linker, e.g., a linker as described herein.

[0476] In certain embodiments of the invention, the GalNAc or GalNAc derivative is attached to an iRNA agent of the invention via a monovalent linker. In some embodiments, the GalNAc or GalNAc derivative is attached to an iRNA agent of the invention via a bivalent linker. In yet other embodiments of the invention, the GalNAc or GalNAc derivative is attached to an iRNA agent of the invention via a trivalent linker. In other embodiments of the invention, the GalNAc or GalNAc derivative is attached to an iRNA agent of the invention via a tetravalent linker.

[0477] In certain embodiments, the double stranded RNAi agents of the invention comprise one GalNAc or GalNAc derivative attached to the iRNA agent. In certain embodiments, the double stranded RNAi agents of the invention comprise a plurality (e.g., 2, 3, 4, 5, or 6) GalNAc or GalNAc derivatives, each independently attached to a plurality of nucleotides of the double stranded RNAi agent through a plurality of monovalent linkers.

[0478] In some embodiments, for example, when the two strands of an iRNA agent of the invention are part of one larger molecule connected by an uninterrupted chain of nucleotides between the 3′-end of one strand and the 5′-end of the respective other strand forming a hairpin loop comprising, a plurality of unpaired nucleotides, each unpaired nucleotide within the hairpin loop may independently comprise a GalNAc or GalNAc derivative attached via a monovalent linker. The hairpin loop may also be formed by an extended overhang in one strand of the duplex.

[0479] In some embodiments, for example, when the two strands of an iRNA agent of the invention are part of one larger molecule connected by an uninterrupted chain of nucleotides between the 3′-end of one strand and the 5′-end of the respective other strand forming a hairpin loop comprising, a plurality of unpaired nucleotides, each unpaired nucleotide within the hairpin loop may independently comprise a GalNAc or GalNAc derivative attached via a monovalent linker. The hairpin loop may also be formed by an extended overhang in one strand of the duplex.

[0480] In some embodiments, the GalNAc conjugate is

[chemical structure]

[0481] In some embodiments, the RNAi agent is attached to the carbohydrate conjugate via a linker as shown in the following schematic, wherein X is O or S

[chemical structure]

[0482] In some embodiments, the RNAi agent is conjugated to L96 as defined in Table 1 and shown below:

[chemical structure]

[0483] In certain embodiments, a carbohydrate conjugate for use in the compositions and methods of the invention is selected from the group consisting of:

[chemical structure]

[chemical structure]

[chemical structure]

[chemical structure]

[chemical structure]

[chemical structure]

[chemical structure]

[chemical structure]

[0484] In certain embodiments, a carbohydrate conjugate for use in the compositions and methods of the invention is a monosaccharide. In certain embodiments, the monosaccharide is an N-acetylgalactosamine, such as

[chemical structure]

[0485] Another representative carbohydrate conjugate for use in the embodiments described herein includes but is not limited to

[chemical structure]

[0486] when one of X or Y is an oligonucleotide, the other is a hydrogen.

[0487] In some embodiments, a suitable ligand is a ligand disclosed in WO 2019/055633, the entire contents of which are incorporated herein by reference. In one embodiment the ligand comprises the structure below:

[chemical structure]

[0488] In certain embodiments, the RNAi agents of the disclosure may include GalNAc ligands, even if such GalNAc ligands are currently projected to be of limited value for the intrathecal/CNS delivery route(s) of the instant disclosure.

[0489] In certain embodiments of the invention, the GalNAc or GalNAc derivative is attached to an iRNA agent of the invention via a monovalent linker. In some embodiments, the GalNAc or GalNAc derivative is attached to an iRNA agent of the invention via a bivalent linker. In yet other embodiments of the invention, the GalNAc or GalNAc derivative is attached to an iRNA agent of the invention via a trivalent linker. In other embodiments of the invention, the GalNAc or GalNAc derivative is attached to an iRNA agent of the invention via a tetravalent linker.

[0490] In certain embodiments, the double stranded RNAi agents of the invention comprise one GalNAc or GalNAc derivative attached to the iRNA agent, e.g., the 5′ end of the sense strand of a dsRNA agent, or the 5′ end of one or both sense strands of a dual targeting RNAi agent as described herein. In certain embodiments, the double stranded RNAi agents of the invention comprise a plurality (e.g., 2, 3, 4, 5, or 6) GalNAc or GalNAc derivatives, each independently attached to a plurality of nucleotides of the double stranded RNAi agent through a plurality of monovalent linkers.

[0491] In some embodiments, for example, when the two strands of an iRNA agent of the invention are part of one larger molecule connected by an uninterrupted chain of nucleotides between the 3′-end of one strand and the 5′-end of the respective other strand forming a hairpin loop comprising, a plurality of unpaired nucleotides, each unpaired nucleotide within the hairpin loop may independently comprise a GalNAc or GalNAc derivative attached via a monovalent linker.

[0492] In some embodiments, the carbohydrate conjugate further comprises one or more additional ligands as described above, such as, but not limited to, a PK modulator or a cell permeation peptide.

[0493] Additional carbohydrate conjugates and linkers suitable for use in the present invention include those described in WO 2014/179620 and WO 2014/179627, the entire contents of each of which are incorporated herein by reference.

[0494] D. Linkers

[0495] In some embodiments, the conjugate or ligand described herein can be attached to an iRNA oligonucleotide with various linkers that can be cleavable or non-cleavable.

[0496] The term “linker” or “linking group” means an organic moiety that connects two parts of a compound, e.g., covalently attaches two parts of a compound. Linkers typically comprise a direct bond or an atom such as oxygen or sulfur, a unit such as NR8, C(O), C(O)NH, SO, SO₂, SO₂NH or a chain of atoms, such as, but not limited to, substituted or unsubstituted alkyl, substituted or unsubstituted alkenyl, substituted or unsubstituted alkynyl, arylalkyl, arylalkenyl, arylalkynyl, heteroarylalkyl, heteroarylalkenyl, heteroarylalkynyl, heterocyclylalkyl, heterocyclylalkenyl, heterocyclylalkynyl, aryl, heteroaryl, heterocyclyl, cycloalkyl, cycloalkenyl, alkylarylalkyl, alkylarylalkenyl, alkylarylalkynyl, alkenylarylalkyl, alkenylarylalkenyl, alkenylarylalkynyl, alkynylarylalkyl, alkynylarylalkenyl, alkynylarylalkynyl, alkylheteroarylalkyl, alkylheteroarylalkenyl, alkylheteroarylalkynyl, alkenylheteroarylalkyl, alkenylheteroarylalkenyl, alkenylheteroarylalkynyl, alkynylheteroarylalkyl, alkynylheteroarylalkenyl, alkynylheteroarylalkynyl, alkylheterocyclylalkyl, alkylheterocyclylalkenyl, alkylhererocyclylalkynyl, alkenylheterocyclylalkyl, alkenylheterocyclylalkenyl, alkenylheterocyclylalkynyl, alkynylheterocyclylalkyl, alkynylheterocyclylalkenyl, alkynylheterocyclylalkynyl, alkylaryl, alkenylaryl, alkynylaryl, alkylheteroaryl, alkenylheteroaryl, alkynylhereroaryl, which one or more methylenes can be interrupted or terminated by 0, S, S(O), SO₂, N(R8), C(O), substituted or unsubstituted aryl, substituted or unsubstituted heteroaryl, substituted or unsubstituted heterocyclic; where R8 is hydrogen, acyl, aliphatic or substituted aliphatic. In certain embodiments, the linker is between about 1-24 atoms, 2-24, 3-24, 4-24, 5-24, 6-24, 6-18, 7-18, 8-18 atoms, 7-17, 8-17, 6-16, 7-16, or 8-16 atoms.

[0497] A cleavable linking group is one which is sufficiently stable outside the cell, but which upon entry into a target cell is cleaved to release the two parts the linker is holding together. In one embodiment, the cleavable linking group is cleaved at least about 10 times, 20, times, 30 times, 40 times, 50 times, 60 times, 70 times, 80 times, 90 times or more, or at least about 100 times faster in a target cell or under a first reference condition (which can, e.g., be selected to mimic or represent intracellular conditions) than in the blood of a subject, or under a second reference condition (which can, e.g., be selected to mimic or represent conditions found in the blood or serum).

[0498] Cleavable linking groups are susceptible to cleavage agents, e.g., pH, redox potential or the presence of degradative molecules. Generally, cleavage agents are more prevalent or found at higher levels or activities inside cells than in serum or blood. Examples of such degradative agents include: redox agents which are selected for particular substrates or which have no substrate specificity, including, e.g., oxidative or reductive enzymes or reductive agents such as mercaptans, present in cells, that can degrade a redox cleavable linking group by reduction; esterases; endosomes or agents that can create an acidic environment, e.g., those that result in a pH of five or lower; enzymes that can hydrolyze or degrade an acid cleavable linking group by acting as a general acid, peptidases (which can be substrate specific), and phosphatases.

[0499] A cleavable linkage group, such as a disulfide bond can be susceptible to pH. The pH of human serum is 7.4, while the average intracellular pH is slightly lower, ranging from about 7.1-7.3. Endosomes have a more acidic pH, in the range of 5.5-6.0, and lysosomes have an even more acidic pH at around 5.0. Some linkers will have a cleavable linking group that is cleaved at a selected pH, thereby releasing a cationic lipid from the ligand inside the cell, or into the desired compartment of the cell.

[0500] A linker can include a cleavable linking group that is cleavable by a particular enzyme. The type of cleavable linking group incorporated into a linker can depend on the cell to be targeted. For example, a liver-targeting ligand can be linked to a cationic lipid through a linker that includes an ester group. Liver cells are rich in esterases, and therefore the linker will be cleaved more efficiently in liver cells than in cell types that are not esterase-rich. Other cell-types rich in esterases include cells of the lung, renal cortex, and testis.

[0501] Linkers that contain peptide bonds can be used when targeting cell types rich in peptidases, such as liver cells and synoviocytes.

[0502] In general, the suitability of a candidate cleavable linking group can be evaluated by testing the ability of a degradative agent (or condition) to cleave the candidate linking group. It will also be desirable to also test the candidate cleavable linking group for the ability to resist cleavage in the blood or when in contact with other non-target tissue. Thus, one can determine the relative susceptibility to cleavage between a first and a second condition, where the first is selected to be indicative of cleavage in a target cell and the second is selected to be indicative of cleavage in other tissues or biological fluids, e.g., blood or serum. The evaluations can be carried out in cell free systems, in cells, in cell culture, in organ or tissue culture, or in whole animals. It can be useful to make initial evaluations in cell-free or culture conditions and to confirm by further evaluations in whole animals. In certain embodiments, useful candidate compounds are cleaved at least about 2, 4, 10, 20, 30, 40, 50, 60, 70, 80, 90, or about 100 times faster in the cell (or under in vitro conditions selected to mimic intracellular conditions) as compared to blood or serum (or under in vitro conditions selected to mimic extracellular conditions).

[0503] i. Redox Cleavable Linking Groups

[0504] In certain embodiments, a cleavable linking group is a redox cleavable linking group that is cleaved upon reduction or oxidation. An example of reductively cleavable linking group is a disulphide linking group (—S—S—). To determine if a candidate cleavable linking group is a suitable “reductively cleavable linking group,” or for example is suitable for use with a particular iRNA moiety and particular targeting agent one can look to methods described herein. For example, a candidate can be evaluated by incubation with dithiothreitol (DTT), or other reducing agent using reagents know in the art, which mimic the rate of cleavage which would be observed in a cell, e.g., a target cell. The candidates can also be evaluated under conditions which are selected to mimic blood or serum conditions. In one, candidate compounds are cleaved by at most about 10% in the blood. In other embodiments, useful candidate compounds are degraded at least about 2, 4, 10, 20, 30, 40, 50, 60, 70, 80, 90, or about 100 times faster in the cell (or under in vitro conditions selected to mimic intracellular conditions) as compared to blood (or under in vitro conditions selected to mimic extracellular conditions). The rate of cleavage of candidate compounds can be determined using standard enzyme kinetics assays under conditions chosen to mimic intracellular media and compared to conditions chosen to mimic extracellular media.

[0505] ii. Phosphate-Based Cleavable Linking Groups

[0506] In certain embodiments, a cleavable linker comprises a phosphate-based cleavable linking group. A phosphate-based cleavable linking group is cleaved by agents that degrade or hydrolyze the phosphate group. An example of an agent that cleaves phosphate groups in cells are enzymes such as phosphatases in cells. Examples of phosphate-based linking groups are —O—P(O)(ORk)-O—, —O—P(S)(ORk)-O—, —O—P(S)(SRk)-O—, —S—P(O)(ORk)-O—, —O—P(O)(ORk)-S—, —S—P(O)(ORk)-S—, —O—P(S)(ORk)-S—, —S—P(S)(ORk)-O—, —O—P(O)(Rk)-O—, —O—P(S)(Rk)-O—, —S—P(O)(Rk)-O—, —S—P(S)(Rk)-O—, —S—P(O)(Rk)-S—, —O—P(S)(Rk)-S, wherein Rk at each occurrence can be, independently, C1-C20 alkyl, C1-C20 haloalkyl, C6-C10 aryl, or C7-C12 aralkyl. Exemplary embodiments include —O—P(O)(OH)—O—, —O—P(S)(OH)—O—, —O—P(S)(SH)—O—, —S—P(O)(OH)—O—, —O—P(O)(OH)—S—, —S—P(O)(OH)—S—, —O—P(S)(OH)—S—, —S—P(S)(OH)—O—, —O—P(O)(H)—O—, —O—P(S)(H)—O—, —S—P(O)(H)—O, —S—P(S)(H)—O—, —S—P(O)(H)—S—, and —O—P(S)(H)—S—. In one embodiment, a phosphate-based linking group is —O—P(O)(OH)—O—. These candidates can be evaluated using methods analogous to those described above.

[0507] iii. Acid Cleavable Linking Groups

[0508] In certain embodiments, a cleavable linker comprises an acid cleavable linking group. An acid cleavable linking group is a linking group that is cleaved under acidic conditions. In some embodiments acid cleavable linking groups are cleaved in an acidic environment with a pH of about 6.5 or lower (e.g., about 6.0, 5.75, 5.5, 5.25, 5.0, or lower), or by agents such as enzymes that can act as a general acid. In a cell, specific low pH organelles, such as endosomes and lysosomes can provide a cleaving environment for acid cleavable linking groups. Examples of acid cleavable linking groups include but are not limited to hydrazones, esters, and esters of amino acids. Acid cleavable groups can have the general formula —C═NN—, C(O)O, or —OC(O). An exemplary embodiment is when the carbon attached to the oxygen of the ester (the alkoxy group) is an aryl group, substituted alkyl group, or tertiary alkyl group such as dimethyl pentyl or t-butyl. These candidates can be evaluated using methods analogous to those described above.

[0509] iv. Ester-Based Cleavable Linking Groups

[0510] In certain embodiments, a cleavable linker comprises an ester-based cleavable linking group. An ester-based cleavable linking group is cleaved by enzymes such as esterases and amidases in cells. Examples of ester-based cleavable linking groups include but are not limited to esters of alkylene, alkenylene and alkynylene groups. Ester cleavable linking groups have the general formula —C(O)O—, or —OC(O)—. These candidates can be evaluated using methods analogous to those described above.

[0511] v. Peptide-Based Cleavable Linking Groups

[0512] In yet another embodiment, a cleavable linker comprises a peptide-based cleavable linking group. A peptide-based cleavable linking group is cleaved by enzymes such as peptidases and proteases in cells. Peptide-based cleavable linking groups are peptide bonds formed between amino acids to yield oligopeptides (e.g., dipeptides, tripeptides etc.) and polypeptides. Peptide-based cleavable groups do not include the amide group (—C(O)NH—). The amide group can be formed between any alkylene, alkenylene or alkynelene. A peptide bond is a special type of amide bond formed between amino acids to yield peptides and proteins. The peptide based cleavage group is generally limited to the peptide bond (i.e., the amide bond) formed between amino acids yielding peptides and proteins and does not include the entire amide functional group. Peptide-based cleavable linking groups have the general formula —NHCHRAC(O)NHCHRBC(O)—, where RA and RB are the R groups of the two adjacent amino acids. These candidates can be evaluated using methods analogous to those described above.

[0513] In some embodiments, an iRNA of the invention is conjugated to a carbohydrate through a linker. Non-limiting examples of iRNA carbohydrate conjugates with linkers of the compositions and methods of the invention include, but are not limited to,

[chemical structure]

[chemical structure]

[chemical structure]

when one of X or Y is an oligonucleotide, the other is a hydrogen.

[0514] In certain embodiments of the compositions and methods of the invention, a ligand is one or more “GalNAc” (N-acetylgalactosamine) derivatives attached through a bivalent or trivalent branched linker.

[0515] In certain embodiments, a dsRNA of the invention is conjugated to a bivalent or trivalent branched linker selected from the group of structures shown in any of formula (XLV)-(XLVIII):

[chemical structure]

[0516] wherein:
[0517] q2A, q2B, q3A, q3B, q4A, q4B, q A, q5B and q5C represent independently for each occurrence 0-20 and wherein the repeating unit can be the same or different;
[0518] P^{2A}, P^{2B}, P^{3A}, P^{3B}, P^{4A}, P^{4B}, P^{5A}, P^{5B}, P^{5C}, T^{2A}, T^{2B}, T^{3A}, T^{3B}, T^{4A}, T^{4B}, T^{4A}, T^{5B}, T^{5C} are each independently for each occurrence absent, CO, NH, O, S, OC(O), NHC(O), CH₂, CH₂NH or CH₂O;
[0519] Q^{2A}, Q^{2B}, Q^{3A}, Q^{3B}, Q^{4A}, Q^{4B}, Q^{5A}, Q^{5B}, Q⁵C are independently for each occurrence absent, alkylene, substituted alkylene wherein one or more methylenes can be interrupted or terminated by one or more of 0, S, S(O), SO₂, N(R^{N}), C(R′)═C(R″), C≡C or C(O);
[0520] R^{2A}, R^{2B}, R^{3A}, R^{3B}, R^{4A}, R^{4B}, R^{5A}, R^{5B}, R⁵C are each independently for each occurrence absent,

[chemical structure]

or heterocyclyl;
[0521] L^{2A}, L^{2B}, L^{3A}, L^{3B}, L^{4A}, L^{4B}, L^{5A}, L^{5B} and L^{5C} represent the ligand; i.e. each independently for each occurrence a monosaccharide (such as GalNAc), disaccharide, trisaccharide, tetrasaccharide, oligosaccharide, or polysaccharide; and R^{a} is H or amino acid side chain. Trivalent conjugating GalNAc derivatives are particularly useful for use with RNAi agents for inhibiting the expression of a target gene, such as those of formula (XLIX):

[chemical structure]

[0522] wherein L^{5A}, L^{5B} and L^{5C} represent a monosaccharide, such as GalNAc derivative.

[0523] Examples of suitable bivalent and trivalent branched linker groups conjugating GalNAc derivatives include, but are not limited to, the structures recited above as formulas II, VII, XI, X, and XIII.

[0524] Representative U.S. patents that teach the preparation of RNA conjugates include, but are not limited to, U.S. Pat. Nos. 4,828,979; 4,948,882; 5,218,105; 5,525,465; 5,541,313; 5,545,730; 5,552,538; 5,578,717, 5,580,731; 5,591,584; 5,109,124; 5,118,802; 5,138,045; 5,414,077; 5,486,603; 5,512,439; 5,578,718; 5,608,046; 4,587,044; 4,605,735; 4,667,025; 4,762,779; 4,789,737; 4,824,941; 4,835,263; 4,876,335; 4,904,582; 4,958,013; 5,082,830; 5,112,963; 5,214,136; 5,082,830; 5,112,963; 5,214,136; 5,245,022; 5,254,469; 5,258,506; 5,262,536; 5,272,250; 5,292,873; 5,317,098; 5,371,241, 5,391,723; 5,416,203, 5,451,463; 5,510,475; 5,512,667; 5,514,785; 5,565,552; 5,567,810; 5,574,142; 5,585,481; 5,587,371; 5,595,726; 5,597,696; 5,599,923; 5,599,928; 5,688,941; 6,294,664; 6,320,017; 6,576,752; 6,783,931; 6,900,297; 7,037,646; and 8,106,022, the entire contents of each of which are hereby incorporated herein by reference.

[0525] It is not necessary for all positions in a given compound to be uniformly modified, and in fact more than one of the aforementioned modifications can be incorporated in a single compound or even at a single nucleoside within an iRNA. The present invention also includes iRNA compounds that are chimeric compounds.

[0526] “Chimeric” iRNA compounds or “chimeras,” in the context of this invention, are iRNA compounds, such as dsRNA agents, that contain two or more chemically distinct regions, each made up of at least one monomer unit, i.e., a nucleotide in the case of a dsRNA compound. These iRNAs typically contain at least one region wherein the RNA is modified so as to confer upon the iRNA increased resistance to nuclease degradation, increased cellular uptake, or increased binding affinity for the target nucleic acid. An additional region of the iRNA can serve as a substrate for enzymes capable of cleaving RNA:DNA or RNA:RNA hybrids. By way of example, RNase H is a cellular endonuclease which cleaves the RNA strand of an RNA:DNA duplex. Activation of RNase H, therefore, results in cleavage of the RNA target, thereby greatly enhancing the efficiency of iRNA inhibition of gene expression. Consequently, comparable results can often be obtained with shorter iRNAs when chimeric dsRNAs are used, compared to phosphorothioate deoxy dsRNAs hybridizing to the same target region. Cleavage of the RNA target can be routinely detected by gel electrophoresis and, if necessary, associated nucleic acid hybridization techniques known in the art.

[0527] In certain instances, the RNA of an iRNA can be modified by a non-ligand group. A number of non-ligand molecules have been conjugated to iRNAs in order to enhance the activity, cellular distribution or cellular uptake of the iRNA, and procedures for performing such conjugations are available in the scientific literature. Such non-ligand moieties have included lipid moieties, such as cholesterol (Kubo, T. et al., Biochem. Biophys. Res. Comm., 2007, 365(1):54-61; Letsinger et al., Proc. Natl. Acad. Sci. USA, 1989, 86:6553), cholic acid (Manoharan et al., Bioorg. Med. Chem. Lett., 1994, 4:1053), a thioether, e.g., hexyl-S-tritylthiol (Manoharan et al., Ann. N.Y. Acad. Sci., 1992, 660:306; Manoharan et al., Bioorg. Med. Chem. Let., 1993, 3:2765), a thiocholesterol (Oberhauser et al., Nucl. Acids Res., 1992, 20:533), an aliphatic chain, e.g., dodecandiol or undecyl residues (Saison-Behmoaras et al., EMBO J., 1991, 10:111; Kabanov et al., FEBS Lett., 1990, 259:327; Svinarchuk et al., Biochimie, 1993, 75:49), a phospholipid, e.g., di-hexadecyl-rac-glycerol or triethylammonium 1,2-di-O-hexadecyl-rac-glycero-3-H-phosphonate (Manoharan et al., Tetrahedron Lett., 1995, 36:3651; Shea et al., Nucl. Acids Res., 1990, 18:3777), a polyamine or a polyethylene glycol chain (Manoharan et al., Nucleosides & Nucleotides, 1995, 14:969), or adamantane acetic acid (Manoharan et al., Tetrahedron Lett., 1995, 36:3651), a palmityl moiety (Mishra et al., Biochim. Biophys. Acta, 1995, 1264:229), or an octadecylamine or hexylamino-carbonyl-oxycholesterol moiety (Crooke et al., J. Pharmacol. Exp. Ther., 1996, 277:923). Representative United States patents that teach the preparation of such RNA conjugates have been listed above. Typical conjugation protocols involve the synthesis of RNAs bearing an aminolinker at one or more positions of the sequence. The amino group is then reacted with the molecule being conjugated using appropriate coupling or activating reagents. The conjugation reaction can be performed either with the RNA still bound to the solid support or following cleavage of the RNA, in solution phase. Purification of the RNA conjugate by HPLC typically affords the pure conjugate.

### V. Delivery of an RNAi Agent of the Disclosure

[0528] The delivery of a RNAi agent of the disclosure to a cell e.g., a cell within a subject, such as a human subject (e.g., a subject in need thereof, such as a subject having a GPR75-associated disorder, e.g., a body weight disorder, e.g., obesity, e.g., a subject having or at risk of developing or at risk of having a body weight disorder, e.g., obesity, can be achieved in a number of different ways. For example, delivery may be performed by contacting a cell with an RNAi agent of the disclosure either in vitro or in vivo. In vivo delivery may also be performed directly by administering a composition comprising an RNAi agent, e.g., a dsRNA, to a subject. Alternatively, in vivo delivery may be performed indirectly by administering one or more vectors that encode and direct the expression of the RNAi agent. These alternatives are discussed further below.

[0529] In general, any method of delivering a nucleic acid molecule (in vitro or in vivo) can be adapted for use with a RNAi agent of the disclosure (see e.g., Akhtar S. and Julian R L., (1992) Trends Cell. Biol. 2(5):139-144 and WO94/02595, which are incorporated herein by reference in their entireties). For in vivo delivery, factors to consider in order to deliver an RNAi agent include, for example, biological stability of the delivered agent, prevention of non-specific effects, and accumulation of the delivered agent in the target tissue. The non-specific effects of an RNAi agent can be minimized by local administration, for example, by direct injection or implantation into a tissue or topically administering the preparation. Local administration to a treatment site maximizes local concentration of the agent, limits the exposure of the agent to systemic tissues that can otherwise be harmed by the agent or that can degrade the agent, and permits a lower total dose of the RNAi agent to be administered. Several studies have shown successful knockdown of gene products when an RNAi agent is administered locally. For example, pulmonary delivery, e.g., inhalation, of a dsRNA, e.g., SOD1, has been shown to effectively knockdown gene and protein expression in lung tissue and that there is excellent uptake of the dsRNA by the bronchioles and alveoli of the lung. Intraocular delivery of a VEGF dsRNA by intravitreal injection in cynomolgus monkeys (Tolentino, M J. et al., (2004) Retina 24:132-138) and subretinal injections in mice (Reich, S J. et al. (2003) Mol. Vis. 9:210-216) were also both shown to prevent neovascularization in an experimental model of age-related macular degeneration. In addition, direct intratumoral injection of a dsRNA in mice reduces tumor volume (Pille, J. et al. (2005) Mol. Ther. 11:267-274) and can prolong survival of tumor-bearing mice (Kim, W J. et al., (2006) Mol. Ther. 14:343-350; Li, S. et al., (2007) Mol. Ther. 15:515-523). RNA interference has also shown success with local delivery to the CNS by direct injection (Dorn, G. et al., (2004) Nucleic Acids 32: e49; Tan, P H. et al. (2005) Gene Ther. 12:59-66; Makimura, H. et al (2002) BMC Neurosci. 3:18; Shishkina, G T., et al. (2004) Neuroscience 129:521-528; Thakker, E R., et al. (2004) Proc. Natl. Acad. Sci. U.S.A. 101:17270-17275; Akaneya, Y., et al. (2005) J. Neurophysiol. 93:594-602) and to the lungs by intranasal administration (Howard, K A. et al., (2006) Mol. Ther. 14:476-484; Zhang, X. et al., (2004) J. Biol. Chem. 279:10677-10684; Bitko, V. et al., (2005) Nat. Med. 11:50-55). For administering a RNAi agent systemically for the treatment of a disease, the RNA can be modified or alternatively delivered using a drug delivery system; both methods act to prevent the rapid degradation of the dsRNA by endo- and exo-nucleases in vivo. Modification of the RNA or the pharmaceutical carrier can also permit targeting of the RNAi agent to the target tissue and avoid undesirable off-target effects (e.g., without wishing to be bound by theory, use of GNAs as described herein has been identified to destabilize the seed region of a dsRNA, resulting in enhanced preference of such dsRNAs for on-target effectiveness, relative to off-target effects, as such off-target effects are significantly weakened by such seed region destabilization). RNAi agents can be modified by chemical conjugation to lipophilic groups such as cholesterol to enhance cellular uptake and prevent degradation. For example, a RNAi agent directed against ApoB conjugated to a lipophilic cholesterol moiety was injected systemically into mice and resulted in knockdown of apoB mRNA in both the liver and jejunum (Soutschek, J. et al., (2004) Nature 432:173-178). Conjugation of an RNAi agent to an aptamer has been shown to inhibit tumor growth and mediate tumor regression in a mouse model of prostate cancer (McNamara, J O. et al., (2006) Nat. Biotechnol. 24:1005-1015). In an alternative embodiment, the RNAi agent can be delivered using drug delivery systems such as a nanoparticle, a dendrimer, a polymer, liposomes, or a cationic delivery system. Positively charged cationic delivery systems facilitate binding of molecule RNAi agent (negatively charged) and also enhance interactions at the negatively charged cell membrane to permit efficient uptake of an RNAi agent by the cell. Cationic lipids, dendrimers, or polymers can either be bound to an RNAi agent, or induced to form a vesicle or micelle (see e.g., Kim S H. et al., (2008) Journal of Controlled Release 129(2):107-116) that encases an RNAi agent. The formation of vesicles or micelles further prevents degradation of the RNAi agent when administered systemically. Methods for making and administering cationic-RNAi agent complexes are well within the abilities of one skilled in the art (see e.g., Sorensen, D R., et al. (2003) J. Mol. Biol 327:761-766; Verma, U N. et al., (2003) Clin. Cancer Res. 9:1291-1300; Arnold, A S et al. (2007) J. Hypertens. 25:197-205, which are incorporated herein by reference in their entirety). Some non-limiting examples of drug delivery systems useful for systemic delivery of RNAi agents include DOTAP (Sorensen, D R., et al (2003), supra; Verma, U N. et al., (2003), supra), Oligofectamine, “solid nucleic acid lipid particles” (Zimmermann, T S. et al., (2006) Nature 441:111-114), cardiolipin (Chien, P Y. et al., (2005) Cancer Gene Ther. 12:321-328; Pal, A. et al., (2005) Int J. Oncol. 26:1087-1091), polyethyleneimine (Bonnet M E. et al., (2008) Pharm. Res. August 16 Epub ahead of print; Aigner, A. (2006) J. Biomed. Biotechnol. 71659), Arg-Gly-Asp (RGD) peptides (Liu, S. (2006) Mol. Pharm. 3:472-487), and polyamidoamines (Tomalia, D A. et al., (2007) Biochem. Soc. Trans. 35:61-67; Yoo, H. et al., (1999) Pharm. Res. 16:1799-1804). In some embodiments, a RNAi agent forms a complex with cyclodextrin for systemic administration. Methods for administration and pharmaceutical compositions of RNAi agents and cyclodextrins can be found in U.S. Pat. No. 7,427,605, which is herein incorporated by reference in its entirety.

[0530] Certain aspects of the instant disclosure relate to a method of reducing the expression of a GPR75 gene in a cell, comprising contacting said cell with the double-stranded RNAi agent of the disclosure. In one embodiment, the cell is a hepatic cell, optionally a hepatocyte. In one embodiment, the cell is a neuronal cell.

[0531] In certain embodiments, the RNAi agent is taken up on one or more tissue or cell types present in organs, e.g., liver, kidney.

[0532] Another aspect of the disclosure relates to a method of reducing the expression and/or activity of a GPR75 gene in a subject, comprising administering to the subject the double-stranded RNAi agent of the disclosure.

[0533] Another aspect of the disclosure relates to a method of treating a subject having a GPR75-associated disorder or at risk of having or at risk of developing a GPR75-associated disorder, comprising administering to the subject a therapeutically effective amount of the double-stranded RNAi agent of the disclosure, thereby treating the subject. In some embodiments, the GPR75-associated disorder comprises a body weight disorder, e.g., obesity.

[0534] In one embodiment, the double-stranded RNAi agent is administered subcutaneously.

[0535] In one embodiment, the double-stranded RNAi agent is administered intrathecally. By intrathecal administration of the double-stranded RNAi agent, the method can reduce the expression of an GPR75 target gene in a brain (e.g., striatum) or spine tissue, for instance, cortex, cerebellum, cervical spine, lumbar spine, and thoracic spine.

[0536] In one embodiment, the double-stranded RNAi agent is administered by intravenously.

[0537] For ease of exposition the formulations, compositions and methods in this section are discussed largely with regard to modified siRNA compounds. It may be understood, however, that these formulations, compositions and methods can be practiced with other siRNA compounds, e.g., unmodified siRNA compounds, and such practice is within the disclosure. A composition that includes a RNAi agent can be delivered to a subject by a variety of routes. Exemplary routes include intrathecal administration, pulmonary system, intravenous, subcutaneous, intraventricular, oral, topical, rectal, anal, vaginal, nasal, and ocular.

[0538] The RNAi agents of the disclosure can be incorporated into pharmaceutical compositions suitable for administration. Such compositions typically include one or more species of RNAi agent and a pharmaceutically acceptable carrier. As used herein the language “pharmaceutically acceptable carrier” is intended to include any and all solvents, dispersion media, coatings, antibacterial and antifungal agents, isotonic and absorption delaying agents, and the like, compatible with pharmaceutical administration. The use of such media and agents for pharmaceutically active substances is well known in the art. Except insofar as any conventional media or agent is incompatible with the active compound, use thereof in the compositions is contemplated. Supplementary active compounds can also be incorporated into the compositions.

[0539] The pharmaceutical compositions of the present disclosure may be administered in a number of ways depending upon whether local or systemic treatment is desired and upon the area to be treated. Administration may be intratracheal, intranasal, topical (including ophthalmic, vaginal, rectal, intranasal, transdermal), oral, parenteral, or pulmonary, e.g., by inhalation or insufflation of powders or aerosols, including by nebulizer. Parenteral administration includes intravenous drip, subcutaneous, intraperitoneal, or intramuscular injection, or intrathecal or intraventricular administration.

[0540] The route and site of administration may be chosen to enhance targeting. For example, to target muscle cells, intramuscular injection into the muscles of interest would be a logical choice. Lung cells might be targeted by administering the RNAi agent in powder or aerosol form. The vascular endothelial cells could be targeted by coating a balloon catheter with the RNAi agent and mechanically introducing the RNA.

[0541] Compositions for pulmonary system delivery may include aqueous solutions, e.g., for intranasal or oral inhalative administration, suitable carriers composed of, e.g., lipids (liposomes, niosomes, microemulsions, lipidic micelles, solid lipid nanoparticles) or polymers (polymer micelles, dendrimers, polymeric nanoparticles, nonogels, nanocapsules), adjuvant, e.g., for oral inhalative administration. Aqueous compositions may be sterile and may optionally contain buffers, diluents, absorption enhancers and other suitable additives. Such administration permits both systemic and local delivery of the double stranded RNAi agents of the invention.

[0542] Intranasal administration may include instilling or insufflating a double stranded RNAi agent into the nasal cavity with syringes or droppers by applying a few drops at a time or via atomization. Suitable dosage forms for intranasal administration include drops, powders, nebulized mists, and sprays. Nasal delivery devices include, but not limited to, vapor inhaler, nasal dropper, spray bottle, metered dose spray pump, gas driven spray atomizer, nebulizer, mechanical powder sprayer, breath actuated inhaler, and insufflator. Devices for delivery deeper into the respiratory system, e.g., into the lung, include nebulizer, pressured metered-dose inhaler, dry powder inhaler, and thermal vaporization aerosol device. Devices for delivery by inhalation are available from commercial suppliers. Devices can be fixed or variable dose, single or multidose, disposable or reusable depending on, for example, the disease or disorder to be prevented or treated, the volume of the agent to be delivered, the frequency of delivery of the agent, and other considerations in the art.

[0543] Oral inhalative administration may include use of device, e.g., a passive breath driven or active power driven single/-multiple dose dry powder inhaler (DPI), to deliver a double stranded RNAi agent to the pulmonary system. Suitable dosage forms for oral inhalative administration include powders and solutions. Suitable devices for oral inhalative administration include nebulizers, metered-dose inhalers, and dry powder inhalers. Dry powder inhalers are of the most popular devices used to deliver drugs, especially proteins to the lungs. Exemplary commercially available dry powder inhalers include Spinhaler (Fisons Pharmaceuticals, Rochester, NY) and Rotahaler (GSK, RTP, NC). Several types of nebulizers are available, namely jet nebulizers, ultrasonic nebulizers, vibrating mesh nebulizers. Jet nebulizers are driven by compressed air. Ultrasonic nebulizers use a piezoelectric transducer in order to create droplets from an open liquid reservoir. Vibrating mesh nebulizers use perforated membranes actuated by an annular piezoelement to vibrate in resonant bending mode. The holes in the membrane have a large cross-section size on the liquid supply side and a narrow cross-section size on the side from where the droplets emerge. Depending on the therapeutic application, the hole sizes and number of holes can be adjusted. Selection of a suitable device depends on parameters, such as nature of the drug and its formulation, the site of action, and pathophysiology of the lung. Aqueous suspensions and solutions are nebulized effectively. Aerosols based on mechanically generated vibration mesh technologies also have been used successfully to deliver proteins to lungs.

[0544] The amount of RNAi agent for pulmonary system administration may vary from one target gene to another target gene and the appropriate amount that has to be applied may have to be determined individually for each target gene. Typically, this amount ranges from 10 μg to 2 mg, 50 μg to 1500 μg, or 100 μg to 1000 μg.

[0545] Formulations for topical administration may include transdermal patches, ointments, lotions, creams, gels, drops, suppositories, sprays, liquids, and powders. Conventional pharmaceutical carriers, aqueous, powder or oily bases, thickeners and the like may be necessary or desirable. Coated condoms, gloves, and the like may also be useful.

[0546] Compositions for oral administration include powders or granules, suspensions or solutions in water, syrups, elixirs or non-aqueous media, tablets, capsules, lozenges, or troches. In the case of tablets, carriers that can be used include lactose, sodium citrate and salts of phosphoric acid. Various disintegrants such as starch, and lubricating agents such as magnesium stearate, sodium lauryl sulfate and talc, are commonly used in tablets. For oral administration in capsule form, useful diluents are lactose and high molecular weight polyethylene glycols. When aqueous suspensions are required for oral use, the nucleic acid compositions can be combined with emulsifying and suspending agents. If desired, certain sweetening or flavoring agents can be added. Compositions suitable for oral administration of the agents of the invention are further described in PCT Application No. PCT/US20/33156, the entire contents of which are incorporated herein by reference.

[0547] Compositions for intrathecal or intraventricular administration may include sterile aqueous solutions which may also contain buffers, diluents, and other suitable additives.

[0548] Formulations for parenteral administration may include sterile aqueous solutions which may also contain buffers, diluents, and other suitable additives. Intraventricular injection may be facilitated by an intraventricular catheter, for example, attached to a reservoir. For intravenous use, the total concentration of solutes may be controlled to render the preparation isotonic.

[0549] In one embodiment, the administration of the siRNA compound, e.g., a double-stranded siRNA compound, is parenteral, e.g., intravenous (e.g., as a bolus or as a diffusible infusion), intradermal, intraperitoneal, intramuscular, intrathecal, intraventricular, intracranial, subcutaneous, transmucosal, buccal, sublingual, endoscopic, rectal, oral, vaginal, topical, pulmonary system, intranasal, urethral, or ocular. Administration can be provided by the subject or by another person, e.g., a health care provider. The medication can be provided in measured doses or in a dispenser which delivers a metered dose. Selected modes of delivery are discussed in more detail below.

[0550] Intrathecal Administration.

[0551] In one embodiment, the double-stranded RNAi agent is delivered by intrathecal injection (i.e., injection into the spinal fluid which bathes the brain and spinal cord tissue). Intrathecal injection of RNAi agents into the spinal fluid can be performed as a bolus injection or via minipumps which can be implanted beneath the skin, providing a regular and constant delivery of siRNA into the spinal fluid. The circulation of the spinal fluid from the choroid plexus, where it is produced, down around the spinal chord and dorsal root ganglia and subsequently up past the cerebellum and over the cortex to the arachnoid granulations, where the fluid can exit the CNS, that, depending upon size, stability, and solubility of the compounds injected, molecules delivered intrathecally could hit targets throughout the entire CNS.

[0552] In some embodiments, the intrathecal administration is via a pump. The pump may be a surgically implanted osmotic pump. In one embodiment, the osmotic pump is implanted into the subarachnoid space of the spinal canal to facilitate intrathecal administration.

[0553] In some embodiments, the intrathecal administration is via an intrathecal delivery system for a pharmaceutical including a reservoir containing a volume of the pharmaceutical agent, and a pump configured to deliver a portion of the pharmaceutical agent contained in the reservoir. More details about this intrathecal delivery system may be found in WO 2015/116658, which is incorporated by reference in its entirety.

[0554] The amount of intrathecally injected RNAi agents may vary from one target gene to another target gene and the appropriate amount that has to be applied may have to be determined individually for each target gene. Typically, this amount ranges from 10 μg to 2 mg, 50 μg to 1500 μg, or 100 μg to 1000 μg.

[0555] Vector Encoded RNAi Agents of the Disclosure

[0556] RNAi agents targeting the GPR75 gene can be expressed from transcription units inserted into DNA or RNA vectors (see, e.g., Couture, A, et al., TIG. (1996), 12:5-10; WO 00/22113, WO 00/22114, and U.S. Pat. No. 6,054,299). Expression can be sustained (months or longer), depending upon the specific construct used and the target tissue or cell type. These transgenes can be introduced as a linear construct, a circular plasmid, or a viral vector, which can be an integrating or non-integrating vector. The transgene can also be constructed to permit it to be inherited as an extrachromosomal plasmid (Gassmann, et al., (1995) Proc. Natl. Acad. Sci. USA 92:1292).

[0557] The individual strand or strands of a RNAi agent can be transcribed from a promoter on an expression vector. Where two separate strands are to be expressed to generate, for example, a dsRNA, two separate expression vectors can be co-introduced (e.g., by transfection or infection) into a target cell. Alternatively, each individual strand of a dsRNA can be transcribed by promoters both of which are located on the same expression plasmid. In one embodiment, a dsRNA is expressed as inverted repeat polynucleotides joined by a linker polynucleotide sequence such that the dsRNA has a stem and loop structure.

[0558] RNAi agent expression vectors are generally DNA plasmids or viral vectors. Expression vectors compatible with eukaryotic cells, such as those compatible with vertebrate cells, can be used to produce recombinant constructs for the expression of a RNAi agent as described herein. Delivery of RNAi agent expressing vectors can be systemic, such as by intravenous or intramuscular administration, by administration to target cells ex-planted from the patient followed by reintroduction into the patient, or by any other means that allows for introduction into a desired target cell.

[0559] Viral vector systems which can be utilized with the methods and compositions described herein include, but are not limited to, (a) adenovirus vectors; (b) retrovirus vectors, including but not limited to lentiviral vectors, moloney murine leukemia virus, etc.; (c) adeno-associated virus vectors; (d) herpes simplex virus vectors; (e) SV 40 vectors; (f) polyoma virus vectors; (g) papilloma virus vectors; (h) picornavirus vectors; (i) pox virus vectors such as an orthopox, e.g., vaccinia virus vectors or avipox, e.g. canary pox or fowl pox; and (j) a helper-dependent or gutless adenovirus. Replication-defective viruses can also be advantageous. Different vectors will or will not become incorporated into the cells' genome. The constructs can include viral sequences for transfection, if desired. Alternatively, the construct can be incorporated into vectors capable of episomal replication, e.g. EPV and EBV vectors. Constructs for the recombinant expression of a RNAi agent will generally require regulatory elements, e.g., promoters, enhancers, etc., to ensure the expression of the RNAi agent in target cells. Other aspects to consider for vectors and constructs are known in the art.

### VI. Pharmaceutical Compositions of the Invention

[0560] The present disclosure also includes pharmaceutical compositions and formulations which include the RNAi agents of the disclosure. In one embodiment, provided herein are pharmaceutical compositions containing an RNAi agent, as described herein, and a pharmaceutically acceptable carrier. The pharmaceutical compositions containing the RNAi agent are useful for treating a subject who would benefit from inhibiting or reducing the expression of a GPR75 gene, e.g., a subject having a GPR75-associated disorder, e.g., a subject having or at risk of having or at risk of developing a body weight disorder, e.g., obesity.

[0561] Such pharmaceutical compositions are formulated based on the mode of delivery. One example is compositions that are formulated for systemic administration via parenteral delivery, e.g., by intravenous (IV), intramuscular (IM), or for subcutaneous (subQ) delivery. Another example is compositions that are formulated for direct delivery into the CNS, e.g., by intrathecal or intravitreal routes of injection, optionally by infusion into the brain (e.g., striatum), such as by continuous pump infusion.

[0562] In some embodiments, the pharmaceutical compositions of the invention are pyrogen free or non-pyrogenic.

[0563] The pharmaceutical compositions of the disclosure may be administered in dosages sufficient to inhibit expression of a GPR75 gene. In general, a suitable dose of an RNAi agent of the disclosure will be a flat dose in the range of about 0.001 to about 200.0 mg about once per month to about once per year, typically about once per quarter (i.e., about once every three months) to about once per year, generally a flat dose in the range of about 1 to 50 mg about once per month to about once per year, typically about once per quarter to about once per year. In certain embodiments, the dose will be a fixed dose, e.g., a fixed dose of about 25 μg to about 5 mg.

[0564] A repeat-dose regimen may include administration of a therapeutic amount of a RNAi agent on a regular basis, such as monthly to once every six months. In certain embodiments, the RNAi agent is administered about once per quarter (i.e., about once every three months) to about twice per year, particularly for treatment of a chronic disease.

[0565] After an initial treatment regimen (e.g., loading dose), of once per day, twice per week, once per week, the treatments can be administered on a less frequent basis.

[0566] In other embodiments, a single dose of the pharmaceutical compositions can be long lasting, such that subsequent doses are administered at not more than 1, 2, 3, or 4 or more month intervals. In some embodiments of the disclosure, a single dose of the pharmaceutical compositions of the disclosure is administered once per month. In other embodiments of the disclosure, a single dose of the pharmaceutical compositions of the disclosure is administered once per quarter to twice per year.

[0567] The skilled artisan will appreciate that certain factors can influence the dosage and timing required to effectively treat a subject, including but not limited to the severity of the disease or disorder, previous treatments, the general health or age of the subject, and other diseases present. Moreover, treatment of a subject with a therapeutically effective amount of a composition can include a single treatment or a series of treatments.

[0568] Advances in mouse genetics have generated a number of mouse models for the study of various GPR75-associated diseases that would benefit from reduction in the expression of GPR75. Such models can be used for in vivo testing of RNAi agents, as well as for determining a therapeutically effective dose. Suitable mouse models are known in the art and include, for example, the mouse models described elsewhere herein.

[0569] The pharmaceutical compositions of the present disclosure can be administered in a number of ways depending upon whether local or systemic treatment is desired and upon the area to be treated. Administration can be topical (e.g., by a transdermal patch), pulmonary system administration by intranasal administration or oral inhalative administration, e.g., by inhalation or insufflation of powders or aerosols, including by nebulizer; intratracheal, epidermal and transdermal, oral or parenteral. Parenteral administration includes intravenous, intraarterial, subcutaneous, intraperitoneal or intramuscular injection or infusion; subdermal, e.g., via an implanted device; or intracranial, e.g., by intraparenchymal, intrathecal or intraventricular, administration.

[0570] The RNAi agents can be delivered in a manner to target a particular tissue, such as the liver, the CNS (e.g., neuronal, glial or vascular tissue of the brain), or both the liver and CNS.

[0571] Pharmaceutical compositions and formulations for topical administration can include transdermal patches, ointments, lotions, creams, gels, drops, suppositories, sprays, liquids and powders. Conventional pharmaceutical carriers, aqueous, powder or oily bases, thickeners and the like can be necessary or desirable. Coated condoms, gloves and the like can also be useful. Suitable topical formulations include those in which the RNAi agents featured in the disclosure are in admixture with a topical delivery agent such as lipids, liposomes, fatty acids, fatty acid esters, steroids, chelating agents and surfactants. Suitable lipids and liposomes include neutral (e.g., dioleoylphosphatidyl DOPE ethanolamine, dimyristoylphosphatidyl choline DMPC, distearolyphosphatidyl choline) negative (e.g., dimyristoylphosphatidyl glycerol DMPG) and cationic (e.g., dioleoyltetramethylaminopropyl DOTAP and dioleoylphosphatidyl ethanolamine DOTMA). RNAi agents featured in the disclosure can be encapsulated within liposomes or can form complexes thereto, in particular to cationic liposomes. Alternatively, RNAi agents can be complexed to lipids, in particular to cationic lipids. Suitable fatty acids and esters include but are not limited to arachidonic acid, oleic acid, eicosanoic acid, lauric acid, caprylic acid, capric acid, myristic acid, palmitic acid, stearic acid, linoleic acid, linolenic acid, dicaprate, tricaprate, monoolein, dilaurin, glyceryl 1-monocaprate, 1-dodecylazacycloheptan-2-one, an acylcarnitine, an acylcholine, or a C₁₋₂₀ alkyl ester (e.g., isopropylmyristate IPM), monoglyceride, diglyceride or pharmaceutically acceptable salt thereof. Topical formulations are described in detail in U.S. Pat. No. 6,747,014, which is incorporated herein by reference.

[0572] A. RNAi Agent Formulations Comprising Membranous Molecular Assemblies

[0573] A RNAi agent for use in the compositions and methods of the disclosure can be formulated for delivery in a membranous molecular assembly, e.g., a liposome or a micelle. As used herein, the term “liposome” refers to a vesicle composed of amphiphilic lipids arranged in at least one bilayer, e.g., one bilayer or a plurality of bilayers. Liposomes include unilamellar and multilamellar vesicles that have a membrane formed from a lipophilic material and an aqueous interior. The aqueous portion contains the RNAi agent composition. The lipophilic material isolates the aqueous interior from an aqueous exterior, which typically does not include the RNAi agent composition, although in some examples, it may. Liposomes are useful for the transfer and delivery of active ingredients to the site of action. Because the liposomal membrane is structurally similar to biological membranes, when liposomes are applied to a tissue, the liposomal bilayer fuses with bilayer of the cellular membranes. As the merging of the liposome and cell progresses, the internal aqueous contents that include the RNAi agent are delivered into the cell where the RNAi agent can specifically bind to a target RNA and can mediate RNAi. In some cases the liposomes are also specifically targeted, e.g., to direct the RNAi agent to particular cell types.

[0574] A liposome containing an RNAi agent can be prepared by a variety of methods. In one example, the lipid component of a liposome is dissolved in a detergent so that micelles are formed with the lipid component. For example, the lipid component can be an amphipathic cationic lipid or lipid conjugate. The detergent can have a high critical micelle concentration and may be nonionic. Exemplary detergents include cholate, CHAPS, octylglucoside, deoxycholate, and lauroyl sarcosine. The RNAi agent preparation is then added to the micelles that include the lipid component. The cationic groups on the lipid interact with the RNAi agent and condense around the RNAi agent to form a liposome. After condensation, the detergent is removed, e.g., by dialysis, to yield a liposomal preparation of RNAi agent.

[0575] If necessary a carrier compound that assists in condensation can be added during the condensation reaction, e.g., by controlled addition. For example, the carrier compound can be a polymer other than a nucleic acid (e.g., spermine or spermidine). pH can also adjusted to favor condensation.

[0576] Methods for producing stable polynucleotide delivery vehicles, which incorporate a polynucleotide/cationic lipid complex as structural components of the delivery vehicle, are further described in, e.g., WO 96/37194, the entire contents of which are incorporated herein by reference. Liposome formation can also include one or more aspects of exemplary methods described in Felgner, P. L. et al., (1987) Proc. Natl. Acad. Sci. USA 8:7413-7417; U.S. Pat. Nos. 4,897,355; 5,171,678; Bangham et al., (1965) M. Mol. Biol. 23:238; Olson et al., (1979) Biochim. Biophys. Acta 557:9; Szoka et al., (1978) Proc. Nat. Acad. Sci. 75: 4194; Mayhew et al., (1984) Biochim. Biophys. Acta 775:169; Kim et al., (1983) Biochim. Biophys. Acta 728:339; and Fukunaga et al., (1984) Endocrinol. 115:757. Commonly used techniques for preparing lipid aggregates of appropriate size for use as delivery vehicles include sonication and freeze-thaw plus extrusion (see, e.g., Mayer et al., (1986) Biochim. Biophys. Acta 858:161. Microfluidization can be used when consistently small (50 to 200 nm) and relatively uniform aggregates are desired (Mayhew et al., (1984) Biochim. Biophys. Acta 775:169. These methods are readily adapted to packaging RNAi agent preparations into liposomes.

[0577] Liposomes fall into two broad classes. Cationic liposomes are positively charged liposomes which interact with the negatively charged nucleic acid molecules to form a stable complex. The positively charged nucleic acid/liposome complex binds to the negatively charged cell surface and is internalized in an endosome. Due to the acidic pH within the endosome, the liposomes are ruptured, releasing their contents into the cell cytoplasm (Wang et al. (1987) Biochem. Biophys. Res. Commun., 147:980-985).

[0578] Liposomes, which are pH-sensitive or negatively charged, entrap nucleic acids rather than complex with them. Since both the nucleic acid and the lipid are similarly charged, repulsion rather than complex formation occurs. Nevertheless, some nucleic acid is entrapped within the aqueous interior of these liposomes. pH sensitive liposomes have been used to deliver nucleic acids encoding the thymidine kinase gene to cell monolayers in culture. Expression of the exogenous gene was detected in the target cells (Zhou et al. (1992) Journal of Controlled Release, 19:269-274).

[0579] One major type of liposomal composition includes phospholipids other than naturally-derived phosphatidylcholine. Neutral liposome compositions, for example, can be formed from dimyristoyl phosphatidylcholine (DMPC) or dipalmitoyl phosphatidylcholine (DPPC). Anionic liposome compositions generally are formed from dimyristoyl phosphatidylglycerol, while anionic fusogenic liposomes are formed primarily from dioleoyl phosphatidylethanolamine (DOPE). Another type of liposomal composition is formed from phosphatidylcholine (PC) such as, for example, soybean PC, and egg PC. Another type is formed from mixtures of phospholipid or phosphatidylcholine or cholesterol.

[0580] Examples of other methods to introduce liposomes into cells in vitro and in vivo include U.S. Pat. Nos. 5,283,185; 5,171,678; WO 94/00569; WO 93/24640; WO 91/16024; Felgner, (1994) J. Biol. Chem. 269:2550; Nabel, (1993) Proc. Natl. Acad. Sci. 90: 11307; Nabel, (1992) Human Gene Ther. 3:649; Gershon, (1993) Biochem. 32:7143; and Strauss, (1992) EMBO J. 11:417.

[0581] Non-ionic liposomal systems have also been examined to determine their utility in the delivery of drugs to the skin, in particular systems comprising non-ionic surfactant and cholesterol. Non-ionic liposomal formulations comprising Novasome™ I (glyceryl dilaurate/cholesterol/polyoxyethylene-10-stearyl ether) and Novasome™ II (glyceryl distearate/cholesterol/polyoxyethylene-10-stearyl ether) were used to deliver cyclosporin-A into the dermis of mouse skin. Results indicated that such non-ionic liposomal systems were effective in facilitating the deposition of cyclosporine A into different layers of the skin (Hu et al., (1994) S.T.P.Pharma. Sci., 4(6):466).

[0582] Liposomes also include “sterically stabilized” liposomes, a term which, as used herein, refers to liposomes comprising one or more specialized lipids that, when incorporated into liposomes, result in enhanced circulation lifetimes relative to liposomes lacking such specialized lipids. Examples of sterically stabilized liposomes are those in which part of the vesicle-forming lipid portion of the liposome (A) comprises one or more glycolipids, such as monosialoganglioside G_{M1}, or (B) is derivatized with one or more hydrophilic polymers, such as a polyethylene glycol (PEG) moiety. While not wishing to be bound by any particular theory, it is thought in the art that, at least for sterically stabilized liposomes containing gangliosides, sphingomyelin, or PEG-derivatized lipids, the enhanced circulation half-life of these sterically stabilized liposomes derives from a reduced uptake into cells of the reticuloendothelial system (RES) (Allen et al., (1987) FEBS Letters, 223:42; Wu et al., (1993) Cancer Research, 53:3765).

[0583] Various liposomes comprising one or more glycolipids are known in the art. Papahadjopoulos et al. (Ann. N.Y. Acad. Sci., (1987), 507:64) reported the ability of monosialoganglioside G_{M1}, galactocerebroside sulfate and phosphatidylinositol to improve blood half-lives of liposomes. These findings were expounded upon by Gabizon et al. (Proc. Natl. Acad. Sci. U.S.A., (1988), 85: 6949). U.S. Pat. No. 4,837,028 and WO 88/04924, both to Allen et al., disclose liposomes comprising (1) sphingomyelin and (2) the ganglioside G_{M1} or a galactocerebroside sulfate ester. U.S. Pat. No. 5,543,152 (Webb et al.) discloses liposomes comprising sphingomyelin. Liposomes comprising 1,2-sn-dimyristoylphosphatidylcholine are disclosed in WO 97/13499 (Lim et al).

[0584] In one embodiment, cationic liposomes are used. Cationic liposomes possess the advantage of being able to fuse to the cell membrane. Non-cationic liposomes, although not able to fuse as efficiently with the plasma membrane, are taken up by macrophages in vivo and can be used to deliver RNAi agents to macrophages.

[0585] Further advantages of liposomes include: liposomes obtained from natural phospholipids are biocompatible and biodegradable; liposomes can incorporate a wide range of water and lipid soluble drugs; liposomes can protect encapsulated RNAi agents in their internal compartments from metabolism and degradation (Rosoff, in “Pharmaceutical Dosage Forms,” Lieberman, Rieger and Banker (Eds.), 1988, volume 1, p. 245). Important considerations in the preparation of liposome formulations are the lipid surface charge, vesicle size and the aqueous volume of the liposomes.

[0586] A positively charged synthetic cationic lipid, N-[1-(2,3-dioleyloxy)propyl]-N,N,N-trimethylammonium chloride (DOTMA) can be used to form small liposomes that interact spontaneously with nucleic acid to form lipid-nucleic acid complexes which are capable of fusing with the negatively charged lipids of the cell membranes of tissue culture cells, resulting in delivery of RNAi agent (see, e.g., Felgner, P. L. et al., (1987) Proc. Natl. Acad. Sci. USA 8:7413-7417, and U.S. Pat. No. 4,897,355 for a description of DOTMA and its use with DNA).

[0587] A DOTMA analogue, 1,2-bis(oleoyloxy)-3-(trimethylammonia)propane (DOTAP) can be used in combination with a phospholipid to form DNA-complexing vesicles. Lipofectin™ Bethesda Research Laboratories, Gaithersburg, Md.) is an effective agent for the delivery of highly anionic nucleic acids into living tissue culture cells that comprise positively charged DOTMA liposomes which interact spontaneously with negatively charged polynucleotides to form complexes. When enough positively charged liposomes are used, the net charge on the resulting complexes is also positive. Positively charged complexes prepared in this way spontaneously attach to negatively charged cell surfaces, fuse with the plasma membrane, and efficiently deliver functional nucleic acids into, for example, tissue culture cells. Another commercially available cationic lipid, 1,2-bis(oleoyloxy)-3,3-(trimethylammonia)propane (“DOTAP”) (Boehringer Mannheim, Indianapolis, Indiana) differs from DOTMA in that the oleoyl moieties are linked by ester, rather than ether linkages.

[0588] Other reported cationic lipid compounds include those that have been conjugated to a variety of moieties including, for example, carboxyspermine which has been conjugated to one of two types of lipids and includes compounds such as 5-carboxyspermylglycine dioctaoleoylamide (“DOGS”) (Transfectam™, Promega, Madison, Wisconsin) and dipalmitoylphosphatidylethanolamine 5-carboxyspermyl-amide (“DPPES”) (see, e.g., U.S. Pat. No. 5,171,678).

[0589] Another cationic lipid conjugate includes derivatization of the lipid with cholesterol (“DC-Chol”) which has been formulated into liposomes in combination with DOPE (See, Gao, X. and Huang, L., (1991) Biochim. Biophys. Res. Commun. 179:280). Lipopolylysine, made by conjugating polylysine to DOPE, has been reported to be effective for transfection in the presence of serum (Zhou, X. et al., (1991) Biochim. Biophys. Acta 1065:8). For certain cell lines, these liposomes containing conjugated cationic lipids, are said to exhibit lower toxicity and provide more efficient transfection than the DOTMA-containing compositions. Other commercially available cationic lipid products include DMRIE and DMRIE-HP (Vical, La Jolla, California) and Lipofectamine (DOSPA) (Life Technology, Inc., Gaithersburg, Maryland). Other cationic lipids suitable for the delivery of oligonucleotides are described in WO 98/39359 and WO 96/37194.

[0590] Liposomal formulations are particularly suited for topical administration, liposomes present several advantages over other formulations. Such advantages include reduced side effects related to high systemic absorption of the administered drug, increased accumulation of the administered drug at the desired target, and the ability to administer RNAi agent into the skin. In some implementations, liposomes are used for delivering RNAi agent to epidermal cells and also to enhance the penetration of RNAi agent into dermal tissues, e.g., into skin. For example, the liposomes can be applied topically. Topical delivery of drugs formulated as liposomes to the skin has been documented (see, e.g., Weiner et al., (1992) Journal of Drug Targeting, vol. 2,405-410 and du Plessis et al., (1992) Antiviral Research, 18:259-265; Mannino, R. J. and Fould-Fogerite, S., (1998) Biotechniques 6:682-690; Itani, T. et al., (1987) Gene 56:267-276; Nicolau, C. et al. (1987) Meth. Enzymol. 149:157-176; Straubinger, R. M. and Papahadjopoulos, D. (1983) Meth. Enzymol. 101:512-527; Wang, C. Y. and Huang, L., (1987) Proc. Natl. Acad. Sci. USA 84:7851-7855).

[0591] Non-ionic liposomal systems have also been examined to determine their utility in the delivery of drugs to the skin, in particular systems comprising non-ionic surfactant and cholesterol. Non-ionic liposomal formulations comprising Novasome I (glyceryl dilaurate/cholesterol/polyoxyethylene-10-stearyl ether) and Novasome II (glyceryl distearate/cholesterol/polyoxyethylene-10-stearyl ether) were used to deliver a drug into the dermis of mouse skin. Such formulations with RNAi agent are useful for treating a dermatological disorder.

[0592] Liposomes that include RNAi agents can be made highly deformable. Such deformability can enable the liposomes to penetrate through pore that are smaller than the average radius of the liposome. For example, transfersomes are a type of deformable liposomes. Transferosomes can be made by adding surface edge activators, usually surfactants, to a standard liposomal composition. Transfersomes that include RNAi agent can be delivered, for example, subcutaneously by infection in order to deliver RNAi agent to keratinocytes in the skin. In order to cross intact mammalian skin, lipid vesicles must pass through a series of fine pores, each with a diameter less than 50 nm, under the influence of a suitable transdermal gradient. In addition, due to the lipid properties, these transferosomes can be self-optimizing (adaptive to the shape of pores, e.g., in the skin), self-repairing, and can frequently reach their targets without fragmenting, and often self-loading.

[0593] Other formulations amenable to the present disclosure are described in U.S. provisional application Ser. No. 61/018,616, filed Jan. 2, 2008; 61/018,611, filed Jan. 2, 2008; 61/039,748, filed Mar. 26, 2008; 61/047,087, filed Apr. 22, 2008 and 61/051,528, filed May 8, 2008. PCT application number PCT/US2007/080331, filed Oct. 3, 2007, also describes formulations that are amenable to the present disclosure.

[0594] Transfersomes, yet another type of liposomes, are highly deformable lipid aggregates which are attractive candidates for drug delivery vehicles. Transfersomes can be described as lipid droplets which are so highly deformable that they are easily able to penetrate through pores which are smaller than the droplet. Transfersomes are adaptable to the environment in which they are used, e.g., they are self-optimizing (adaptive to the shape of pores in the skin), self-repairing, frequently reach their targets without fragmenting, and often self-loading. To make transfersomes it is possible to add surface edge-activators, usually surfactants, to a standard liposomal composition. Transfersomes have been used to deliver serum albumin to the skin. The transfersome-mediated delivery of serum albumin has been shown to be as effective as subcutaneous injection of a solution containing serum albumin.

[0595] Surfactants find wide application in formulations such as those described herein, particularly in emulsions (including microemulsions) and liposomes. The most common way of classifying and ranking the properties of the many different types of surfactants, both natural and synthetic, is by the use of the hydrophile/lipophile balance (HLB). The nature of the hydrophilic group (also known as the “head”) provides the most useful means for categorizing the different surfactants used in formulations (Rieger, in Pharmaceutical Dosage Forms, Marcel Dekker, Inc., New York, N.Y., 1988, p. 285).

[0596] If the surfactant molecule is not ionized, it is classified as a nonionic surfactant. Nonionic surfactants find wide application in pharmaceutical and cosmetic products and are usable over a wide range of pH values. In general, their HLB values range from 2 to about 18 depending on their structure. Nonionic surfactants include nonionic esters such as ethylene glycol esters, propylene glycol esters, glyceryl esters, polyglyceryl esters, sorbitan esters, sucrose esters, and ethoxylated esters. Nonionic alkanolamides and ethers such as fatty alcohol ethoxylates, propoxylated alcohols, and ethoxylated/propoxylated block polymers are also included in this class. The polyoxyethylene surfactants are the most popular members of the nonionic surfactant class.

[0597] If the surfactant molecule carries a negative charge when it is dissolved or dispersed in water, the surfactant is classified as anionic. Anionic surfactants include carboxylates such as soaps, acyl lactylates, acyl amides of amino acids, esters of sulfuric acid such as alkyl sulfates and ethoxylated alkyl sulfates, sulfonates such as alkyl benzene sulfonates, acyl isethionates, acyl taurates and sulfosuccinates, and phosphates. The most important members of the anionic surfactant class are the alkyl sulfates and the soaps.

[0598] If the surfactant molecule carries a positive charge when it is dissolved or dispersed in water, the surfactant is classified as cationic. Cationic surfactants include quaternary ammonium salts and ethoxylated amines. The quaternary ammonium salts are the most used members of this class.

[0599] If the surfactant molecule has the ability to carry either a positive or negative charge, the surfactant is classified as amphoteric. Amphoteric surfactants include acrylic acid derivatives, substituted alkylamides, N-alkylbetaines and phosphatides.

The use of surfactants in drug products, formulations and in emulsions has been reviewed (Rieger, in Pharmaceutical Dosage Forms, Marcel Dekker, Inc., New York, N.Y., 1988, p. 285).

[0600] The RNAi agent for use in the methods of the disclosure can also be provided as micellar formulations. “Micelles” are defined herein as a particular type of molecular assembly in which amphipathic molecules are arranged in a spherical structure such that all the hydrophobic portions of the molecules are directed inward, leaving the hydrophilic portions in contact with the surrounding aqueous phase. The converse arrangement exists if the environment is hydrophobic.

[0601] A mixed micellar formulation suitable for delivery through transdermal membranes may be prepared by mixing an aqueous solution of the siRNA composition, an alkali metal C₈ to C₂₂ alkyl sulphate, and a micelle forming compounds. Exemplary micelle forming compounds include lecithin, hyaluronic acid, pharmaceutically acceptable salts of hyaluronic acid, glycolic acid, lactic acid, chamomile extract, cucumber extract, oleic acid, linoleic acid, linolenic acid, monoolein, monooleates, monolaurates, borage oil, evening of primrose oil, menthol, trihydroxy oxo cholanyl glycine and pharmaceutically acceptable salts thereof, glycerin, polyglycerin, lysine, polylysine, triolein, polyoxyethylene ethers and analogues thereof, polidocanol alkyl ethers and analogues thereof, chenodeoxycholate, deoxycholate, and mixtures thereof. The micelle forming compounds may be added at the same time or after addition of the alkali metal alkyl sulphate. Mixed micelles will form with substantially any kind of mixing of the ingredients but vigorous mixing in order to provide smaller size micelles.

[0602] In one method a first micellar composition is prepared which contains the siRNA composition and at least the alkali metal alkyl sulphate. The first micellar composition is then mixed with at least three micelle forming compounds to form a mixed micellar composition. In another method, the micellar composition is prepared by mixing the siRNA composition, the alkali metal alkyl sulphate and at least one of the micelle forming compounds, followed by addition of the remaining micelle forming compounds, with vigorous mixing.

[0603] Phenol or m-cresol may be added to the mixed micellar composition to stabilize the formulation and protect against bacterial growth. Alternatively, phenol or m-cresol may be added with the micelle forming ingredients. An isotonic agent such as glycerin may also be added after formation of the mixed micellar composition.

[0604] For delivery of the micellar formulation as a spray, the formulation can be put into an aerosol dispenser and the dispenser is charged with a propellant. The propellant, which is under pressure, is in liquid form in the dispenser. The ratios of the ingredients are adjusted so that the aqueous and propellant phases become one, i.e., there is one phase. If there are two phases, it is necessary to shake the dispenser prior to dispensing a portion of the contents, e.g., through a metered valve. The dispensed dose of pharmaceutical agent is propelled from the metered valve in a fine spray.

[0605] Propellants may include hydrogen-containing chlorofluorocarbons, hydrogen-containing fluorocarbons, dimethyl ether and diethyl ether. In certain embodiments, HFA 134a (1,1,1,2 tetrafluoroethane) may be used.

[0606] The specific concentrations of the essential ingredients can be determined by relatively straightforward experimentation. For absorption through the oral cavities, it is often desirable to increase, e.g., at least double or triple, the dosage for through injection or administration through the gastrointestinal tract.

[0607] Lipid Particles

[0608] RNAi agents, e.g., dsRNAs of in the disclosure may be fully encapsulated in a lipid formulation, e.g., a LNP, or other nucleic acid-lipid particle.

[0609] As used herein, the term “LNP” refers to a stable nucleic acid-lipid particle. LNPs typically contain a cationic lipid, a non-cationic lipid, and a lipid that prevents aggregation of the particle (e.g., a PEG-lipid conjugate). LNPs are extremely useful for systemic applications, as they exhibit extended circulation lifetimes following intravenous (i.v.) injection and accumulate at distal sites (e.g., sites physically separated from the administration site). LNPs include “pSPLP,” which include an encapsulated condensing agent-nucleic acid complex as set forth in WO 00/03683. The particles of the present disclosure typically have a mean diameter of about 50 nm to about 150 nm, more typically about 60 nm to about 130 nm, more typically about 70 nm to about 110 nm, most typically about 70 nm to about 90 nm, and are substantially nontoxic. In addition, the nucleic acids when present in the nucleic acid-lipid particles of the present disclosure are resistant in aqueous solution to degradation with a nuclease. Nucleic acid-lipid particles and their method of preparation are disclosed in, e.g., U.S. Pat. Nos. 5,976,567; 5,981,501; 6,534,484; 6,586,410; 6,815,432; United States Patent publication No. 2010/0324120 and WO 96/40964.

[0610] In one embodiment, the lipid to drug ratio (mass/mass ratio) (e.g., lipid to dsRNA ratio) will be in the range of from about 1:1 to about 50:1, from about 1:1 to about 25:1, from about 3:1 to about 15:1, from about 4:1 to about 10:1, from about 5:1 to about 9:1, or about 6:1 to about 9:1. Ranges intermediate to the above recited ranges are also contemplated to be part of the disclosure.

[0611] Certain specific LNP formulations for delivery of RNAi agents have been described in the art, including, e.g., “LNP01” formulations as described in, e.g., WO 2008/042973, which is hereby incorporated by reference.

[0612] Additional exemplary lipid-dsRNA formulations are identified in the table below:

| | | cationic lipid/non-cationic |
|---|---|---|
| | | lipid/cholesterol/PEG-lipid conjugate |
| | Ionizable/Cationic Lipid | Lipid:siRNA ratio |
| SNALP-1 | 1,2-Dilinolenyloxy-N,N- | DLinDMA/DPPC/Cholesterol/PEG- |
| | dimethylaminopropane (DLinDMA) | CDMA |
| | | (57.1/7.1/34.4/1.4) |
| | | lipid:siRNA ~7:1 |
| 2-XTC | 2,2-Dilinoleyl-4-dimethylaminoethyl-[1,3]- | XTC/DPPC/Cholesterol/PEG-CDMA |
| | dioxolane (XTC) | 57.1/7.1/34.4/1.4 |
| | | lipid:siRNA ~7:1 |
| LNP05 | 2,2-Dilinoleyl-4-dimethylaminoethyl-[1,3]- | XTC/DSPC/Cholesterol/PEG-DMG |
| | dioxolane (XTC) | 57.5/7.5/31.5/3.5 |
| | | lipid:siRNA ~6:1 |
| LNP06 | 2,2-Dilinoleyl-4-dimethylaminoethyl-[1,3]- | XTC/DSPC/Cholesterol/PEG-DMG |
| | dioxolane (XTC) | 57.5/7.5/31.5/3.5 |
| | | lipid:siRNA ~11:1 |
| LNP07 | 2,2-Dilinoleyl-4-dimethylaminoethyl-[1,3]- | XTC/DSPC/Cholesterol/PEG-DMG |
| | dioxolane (XTC) | 60/7.5/31/1.5, |
| | | lipid:siRNA ~6:1 |
| LNP08 | 2,2-Dilinoleyl-4-dimethylaminoethyl-[1,3]- | XTC/DSPC/Cholesterol/PEG-DMG |
| | dioxolane (XTC) | 60/7.5/31/1.5, |
| | | lipid:siRNA ~11:1 |
| LNP09 | 2,2-Dilinoleyl-4-dimethylaminoethyl-[1,3]- | XTC/DSPC/Cholesterol/PEG-DMG |
| | dioxolane (XTC) | 50/10/38.5/1.5 |
| | | Lipid:siRNA 10:1 |
| LNP10 | (3aR,5s,6aS)-N,N-dimethyl-2,2- | ALN100/DSPC/Cholesterol/PEG- |
| | di((9Z,12Z)-octadeca-9,12- | DMG |
| | dienyl)tetrahydro-3aH- | 50/10/38.5/1.5 |
| | cyclopenta[d][1,3]dioxol-5-amine | Lipid:siRNA 10:1 |
| | (ALN100) | |
| LNP11 | (6Z,9Z,28Z,31Z)-heptatriaconta-6,9,28,31- | MC-3/DSPC/Cholesterol/PEG-DMG |
| | tetraen-19-yl 4-(dimethylamino)butanoate | 50/10/38.5/1.5 |
| | (MC3) | Lipid:siRNA 10:1 |
| LNP12 | 1,1′-(2-(4-(2-((2-(bis(2- | Tech G1/DSPC/Cholesterol/PEG- |
| | hydroxydodecyl)amino)ethyl)(2- | DMG |
| | hydroxydodecyl)amino)ethyl)piperazin-1- | 50/10/38.5/1.5 |
| | yl)ethylazanediyl)didodecan-2-ol (Tech | Lipid:siRNA 10:1 |
| | G1) | |
| LNP13 | XTC | XTC/DSPC/Chol/PEG-DMG |
| | | 50/10/38.5/1.5 |
| | | Lipid:siRNA: 33:1 |
| LNP14 | MC3 | MC3/DSPC/Chol/PEG-DMG |
| | | 40/15/40/5 |
| | | Lipid:siRNA: 11:1 |
| LNP15 | MC3 | MC3/DSPC/Chol/PEG-DSG/GalNAc- |
| | | PEG-DSG |
| | | 50/10/35/4.5/0.5 |
| | | Lipid:siRNA: 11:1 |
| LNP16 | MC3 | MC3/DSPC/Chol/PEG-DMG |
| | | 50/10/38.5/1.5 |
| | | Lipid:siRNA: 7:1 |
| LNP17 | MC3 | MC3/DSPC/Chol/PEG-DSG |
| | | 50/10/38.5/1.5 |
| | | Lipid:siRNA: 10:1 |
| LNP18 | MC3 | MC3/DSPC/Chol/PEG-DMG |
| | | 50/10/38.5/1.5 |
| | | Lipid:siRNA: 12:1 |
| LNP19 | MC3 | MC3/DSPC/Chol/PEG-DMG |
| | | 50/10/35/5 |
| | | Lipid:siRNA: 8:1 |
| LNP20 | MC3 | MC3/DSPC/Chol/PEG-DPG |
| | | 50/10/38.5/1.5 |
| | | Lipid:siRNA: 10:1 |
| LNP21 | C12-200 | C12-200/DSPC/Chol/PEG-DSG |
| | | 50/10/38.5/1.5 |
| | | Lipid:siRNA: 7:1 |
| LNP22 | XTC | XTC/DSPC/Chol/PEG-DSG |
| | | 50/10/38.5/1.5 |
| | | Lipid:siRNA: 10:1 |

DSPC: distearoylphosphatidylcholine
DPPC: dipalmitoylphosphatidylcholine
PEG-DMG: PEG-didimyristoyl glycerol (C14-PEG, or PEG-C14) (PEG with avg mol wt of 2000)
PEG-DSG: PEG-distyryl glycerol (C18-PEG, or PEG-C18) (PEG with avg mol wt of 2000)
PEG-CDMA: PEG-carbamoyl-1,2-dimyristyloxypropylamine (PEG with avg mol wt of 2000)
SNALP (1,2-Dilinolenyloxy-N,N-dimethylaminopropane (DLinDMA)) comprising formulations are described in WO 2009/127060, which is hereby incorporated by reference.
XTC comprising formulations are described in WO 2010/088537, the entire contents of which are hereby incorporated herein by reference.
MC3 comprising formulations are described, e.g., in United States Patent Publication No. 2010/0324120, the entire contents of which are hereby incorporated by reference.
ALNY-100 comprising formulations are described in WO 2010/054406, the entire contents of which are hereby incorporated herein by reference.
C12-200 comprising formulations are described in WO 2010/129709, the entire contents of which are hereby incorporated herein by reference.

[0613] Compositions and formulations for oral administration include powders or granules, microparticulates, nanoparticulates, suspensions or solutions in water or non-aqueous media, capsules, gel capsules, sachets, tablets or minitablets. Thickeners, flavoring agents, diluents, emulsifiers, dispersing aids or binders can be desirable. In some embodiments, oral formulations are those in which dsRNAs featured in the disclosure are administered in conjunction with one or more penetration enhancer surfactants and chelators. Suitable surfactants include fatty acids or esters or salts thereof, bile acids or salts thereof. Suitable bile acids/salts include chenodeoxycholic acid (CDCA) and ursodeoxychenodeoxycholic acid (UDCA), cholic acid, dehydrocholic acid, deoxycholic acid, glucholic acid, glycholic acid, glycodeoxycholic acid, taurocholic acid, taurodeoxycholic acid, sodium tauro-24,25-dihydro-fusidate and sodium glycodihydrofusidate. Suitable fatty acids include arachidonic acid, undecanoic acid, oleic acid, lauric acid, caprylic acid, capric acid, myristic acid, palmitic acid, stearic acid, linoleic acid, linolenic acid, dicaprate, tricaprate, monoolein, dilaurin, glyceryl 1-monocaprate, 1-dodecylazacycloheptan-2-one, an acylcarnitine, an acylcholine, or a monoglyceride, a diglyceride or a pharmaceutically acceptable salt thereof (e.g., sodium). In some embodiments, combinations of penetration enhancers are used, for example, fatty acids/salts in combination with bile acids/salts. One exemplary combination is the sodium salt of lauric acid, capric acid and UDCA. Further penetration enhancers include polyoxyethylene-9-lauryl ether, polyoxyethylene-20-cetyl ether. DsRNAs featured in the disclosure can be delivered orally, in granular form including sprayed dried particles, or complexed to form micro or nanoparticles. DsRNA complexing agents include poly-amino acids; polyimines; polyacrylates; polyalkylacrylates, polyoxethanes, polyalkylcyanoacrylates; cationized gelatins, albumins, starches, acrylates, polyethyleneglycols (PEG) and starches; polyalkylcyanoacrylates; DEAE-derivatized polyimines, pollulans, celluloses and starches. Suitable complexing agents include chitosan, N-trimethylchitosan, poly-L-lysine, polyhistidine, polyornithine, polyspermines, protamine, polyvinylpyridine, polythiodiethylaminomethylethylene P(TDAE), polyaminostyrene (e.g., p-amino), poly(methylcyanoacrylate), poly(ethylcyanoacrylate), poly(butylcyanoacrylate), poly(isobutylcyanoacrylate), poly(isohexylcynaoacrylate), DEAE-methacrylate, DEAE-hexylacrylate, DEAE-acrylamide, DEAE-albumin and DEAE-dextran, polymethylacrylate, polyhexylacrylate, poly(D,L-lactic acid), poly(DL-lactic-co-glycolic acid (PLGA), alginate, and polyethyleneglycol (PEG). Oral formulations for dsRNAs and their preparation are described in detail in U.S. Pat. No. 6,887,906, U.S. 2003/0027780, and U.S. Pat. No. 6,747,014, each of which is incorporated herein by reference.

[0614] Compositions and formulations for parenteral, intraparenchymal (into the brain), intrathecal, intraventricular or intrahepatic administration can include sterile aqueous solutions which can also contain buffers, diluents and other suitable additives such as, but not limited to, penetration enhancers, carrier compounds and other pharmaceutically acceptable carriers or excipients.

[0615] Pharmaceutical compositions of the present disclosure include, but are not limited to, solutions, emulsions, and liposome-containing formulations. These compositions can be generated from a variety of components that include, but are not limited to, preformed liquids, self-emulsifying solids and self-emulsifying semisolids. Particularly useful formulations include those that target the brain when treating GPR75-associated diseases or disorders.

[0616] The pharmaceutical formulations of the present disclosure, which can conveniently be presented in unit dosage form, can be prepared according to conventional techniques well known in the pharmaceutical industry. Such techniques include the step of bringing into association the active ingredients with the pharmaceutical carrier(s) or excipient(s). In general, the formulations are prepared by uniformly and intimately bringing into association the active ingredients with liquid carriers or finely divided solid carriers or both, and then, if necessary, shaping the product.

[0617] The compositions of the present disclosure can be formulated into any of many possible dosage forms such as, but not limited to, tablets, capsules, gel capsules, liquid syrups, soft gels, suppositories, and enemas. The compositions of the present disclosure can also be formulated as suspensions in aqueous, non-aqueous or mixed media. Aqueous suspensions can further contain substances which increase the viscosity of the suspension including, for example, sodium carboxymethylcellulose, sorbitol or dextran. The suspension can also contain stabilizers.

[0618] Additional Formulations

[0619] i. Emulsions

[0620] The compositions of the present disclosure can be prepared and formulated as emulsions. Emulsions are typically heterogeneous systems of one liquid dispersed in another in the form of droplets usually exceeding 0.1 m in diameter (see e.g., Ansel's Pharmaceutical Dosage Forms and Drug Delivery Systems, Allen, LV., Popovich N G., and Ansel H C., 2004, Lippincott Williams & Wilkins (8th ed.), New York, NY; Idson, in Pharmaceutical Dosage Forms, Lieberman, Rieger and Banker (Eds.), 1988, Marcel Dekker, Inc., New York, N.Y., volume 1, p. 199; Rosoff, in Pharmaceutical Dosage Forms, Lieberman, Rieger and Banker (Eds.), 1988, Marcel Dekker, Inc., New York, N.Y., Volume 1, p. 245; Block in Pharmaceutical Dosage Forms, Lieberman, Rieger and Banker (Eds.), 1988, Marcel Dekker, Inc., New York, N.Y., volume 2, p. 335; Higuchi et al., in Remington's Pharmaceutical Sciences, Mack Publishing Co., Easton, Pa., 1985, p. 301). Emulsions are often biphasic systems comprising two immiscible liquid phases intimately mixed and dispersed with each other. In general, emulsions can be of either the water-in-oil (w/o) or the oil-in-water (o/w) variety. When an aqueous phase is finely divided into and dispersed as minute droplets into a bulk oily phase, the resulting composition is called a water-in-oil (w/o) emulsion. Alternatively, when an oily phase is finely divided into and dispersed as minute droplets into a bulk aqueous phase, the resulting composition is called an oil-in-water (o/w) emulsion. Emulsions can contain additional components in addition to the dispersed phases, and the active drug which can be present as a solution in either aqueous phase, oily phase or itself as a separate phase. Pharmaceutical excipients such as emulsifiers, stabilizers, dyes, and anti-oxidants can also be present in emulsions as needed. Pharmaceutical emulsions can also be multiple emulsions that are comprised of more than two phases such as, for example, in the case of oil-in-water-in-oil (o/w/o) and water-in-oil-in-water (w/o/w) emulsions. Such complex formulations often provide certain advantages that simple binary emulsions do not. Multiple emulsions in which individual oil droplets of an o/w emulsion enclose small water droplets constitute a w/o/w emulsion. Likewise, a system of oil droplets enclosed in globules of water stabilized in an oily continuous phase provides an o/w/o emulsion.

[0621] Emulsions are characterized by little or no thermodynamic stability. Often, the dispersed or discontinuous phase of the emulsion is well dispersed into the external or continuous phase and maintained in this form through the means of emulsifiers or the viscosity of the formulation. Either of the phases of the emulsion can be a semisolid or a solid, as is the case of emulsion-style ointment bases and creams. Other means of stabilizing emulsions entail the use of emulsifiers that can be incorporated into either phase of the emulsion. Emulsifiers can broadly be classified into four categories: synthetic surfactants, naturally occurring emulsifiers, absorption bases, and finely dispersed solids (see e.g., Ansel's Pharmaceutical Dosage Forms and Drug Delivery Systems, Allen, LV., Popovich N G., and Ansel H C., 2004, Lippincott Williams & Wilkins (8th ed.), New York, NY; Idson, in Pharmaceutical Dosage Forms, Lieberman, Rieger and Banker (Eds.), 1988, Marcel Dekker, Inc., New York, N.Y., volume 1, p. 199).

[0622] Synthetic surfactants, also known as surface active agents, have found wide applicability in the formulation of emulsions and have been reviewed in the literature (see e.g., Ansel's Pharmaceutical Dosage Forms and Drug Delivery Systems, Allen, LV., Popovich N G., and Ansel H C., 2004, Lippincott Williams & Wilkins (8th ed.), New York, NY; Rieger, in Pharmaceutical Dosage Forms, Lieberman, Rieger and Banker (Eds.), 1988, Marcel Dekker, Inc., New York, N.Y., volume 1, p. 285; Idson, in Pharmaceutical Dosage Forms, Lieberman, Rieger and Banker (Eds.), Marcel Dekker, Inc., New York, N.Y., 1988, volume 1, p. 199). Surfactants are typically amphiphilic and comprise a hydrophilic and a hydrophobic portion. The ratio of the hydrophilic to the hydrophobic nature of the surfactant has been termed the hydrophile/lipophile balance (HLB) and is a valuable tool in categorizing and selecting surfactants in the preparation of formulations. Surfactants can be classified into different classes based on the nature of the hydrophilic group: nonionic, anionic, cationic and amphoteric (see e.g., Ansel's Pharmaceutical Dosage Forms and Drug Delivery Systems, Allen, LV., Popovich N G., and Ansel H C., 2004, Lippincott Williams & Wilkins (8th ed.), New York, NY Rieger, in Pharmaceutical Dosage Forms, Lieberman, Rieger and Banker (Eds.), 1988, Marcel Dekker, Inc., New York, N.Y., volume 1, p. 285).

[0623] Naturally occurring emulsifiers used in emulsion formulations include lanolin, beeswax, phosphatides, lecithin and acacia. Absorption bases possess hydrophilic properties such that they can soak up water to form w/o emulsions yet retain their semisolid consistencies, such as anhydrous lanolin and hydrophilic petrolatum. Finely divided solids have also been used as good emulsifiers especially in combination with surfactants and in viscous preparations. These include polar inorganic solids, such as heavy metal hydroxides, nonswelling clays such as bentonite, attapulgite, hectorite, kaolin, montmorillonite, colloidal aluminum silicate and colloidal magnesium aluminum silicate, pigments and nonpolar solids such as carbon or glyceryl tristearate.

[0624] A large variety of non-emulsifying materials are also included in emulsion formulations and contribute to the properties of emulsions. These include fats, oils, waxes, fatty acids, fatty alcohols, fatty esters, humectants, hydrophilic colloids, preservatives and antioxidants (Block, in Pharmaceutical Dosage Forms, Lieberman, Rieger and Banker (Eds.), 1988, Marcel Dekker, Inc., New York, N.Y., volume 1, p. 335; Idson, in Pharmaceutical Dosage Forms, Lieberman, Rieger and Banker (Eds.), 1988, Marcel Dekker, Inc., New York, N.Y., volume 1, p. 199).

[0625] Hydrophilic colloids or hydrocolloids include naturally occurring gums and synthetic polymers such as polysaccharides (for example, acacia, agar, alginic acid, carrageenan, guar gum, karaya gum, and tragacanth), cellulose derivatives (for example, carboxymethylcellulose and carboxypropylcellulose), and synthetic polymers (for example, carbomers, cellulose ethers, and carboxyvinyl polymers). These disperse or swell in water to form colloidal solutions that stabilize emulsions by forming strong interfacial films around the dispersed-phase droplets and by increasing the viscosity of the external phase.

[0626] Since emulsions often contain a number of ingredients such as carbohydrates, proteins, sterols and phosphatides that can readily support the growth of microbes, these formulations often incorporate preservatives. Commonly used preservatives included in emulsion formulations include methyl paraben, propyl paraben, quaternary ammonium salts, benzalkonium chloride, esters of p-hydroxybenzoic acid, and boric acid. Antioxidants are also commonly added to emulsion formulations to prevent deterioration of the formulation. Antioxidants used can be free radical scavengers such as tocopherols, alkyl gallates, butylated hydroxyanisole, butylated hydroxytoluene, or reducing agents such as ascorbic acid and sodium metabisulfite, and antioxidant synergists such as citric acid, tartaric acid, and lecithin.

[0627] The application of emulsion formulations via dermatological, oral and parenteral routes and methods for their manufacture have been reviewed in the literature (see e.g., Ansel's Pharmaceutical Dosage Forms and Drug Delivery Systems, Allen, LV., Popovich N G., and Ansel H C., 2004, Lippincott Williams & Wilkins (8th ed.), New York, NY; Idson, in Pharmaceutical Dosage Forms, Lieberman, Rieger and Banker (Eds.), 1988, Marcel Dekker, Inc., New York, N.Y., volume 1, p. 199). Emulsion formulations for oral delivery have been very widely used because of ease of formulation, as well as efficacy from an absorption and bioavailability standpoint (see e.g., Ansel's Pharmaceutical Dosage Forms and Drug Delivery Systems, Allen, LV., Popovich N G., and Ansel H C., 2004, Lippincott Williams & Wilkins (8th ed.), New York, NY; Rosoff, in Pharmaceutical Dosage Forms, Lieberman, Rieger and Banker (Eds.), 1988, Marcel Dekker, Inc., New York, N.Y., volume 1, p. 245; Idson, in Pharmaceutical Dosage Forms, Lieberman, Rieger and Banker (Eds.), 1988, Marcel Dekker, Inc., New York, N.Y., volume 1, p. 199). Mineral-oil base laxatives, oil-soluble vitamins and high fat nutritive preparations are among the materials that have commonly been administered orally as o/w emulsions.

[0628] ii. Microemulsions

[0629] In one embodiment of the present disclosure, the compositions of RNAi agents and nucleic acids are formulated as microemulsions. A microemulsion can be defined as a system of water, oil and amphiphile which is a single optically isotropic and thermodynamically stable liquid solution (see e.g., Ansel's Pharmaceutical Dosage Forms and Drug Delivery Systems, Allen, LV., Popovich N G., and Ansel H C., 2004, Lippincott Williams & Wilkins (8th ed.), New York, NY; Rosoff, in Pharmaceutical Dosage Forms, Lieberman, Rieger and Banker (Eds.), 1988, Marcel Dekker, Inc., New York, N.Y., volume 1, p. 245). Typically, microemulsions are systems that are prepared by first dispersing an oil in an aqueous surfactant solution and then adding a sufficient amount of a fourth component, generally an intermediate chain-length alcohol to form a transparent system. Therefore, microemulsions have also been described as thermodynamically stable, isotropically clear dispersions of two immiscible liquids that are stabilized by interfacial films of surface-active molecules (Leung and Shah, in: Controlled Release of Drugs: Polymers and Aggregate Systems, Rosoff, M., Ed., 1989, VCH Publishers, New York, pages 185-215). Microemulsions commonly are prepared via a combination of three to five components that include oil, water, surfactant, cosurfactant and electrolyte. Whether the microemulsion is of the water-in-oil (w/o) or an oil-in-water (o/w) type is dependent on the properties of the oil and surfactant used, and on the structure and geometric packing of the polar heads and hydrocarbon tails of the surfactant molecules (Schott, in Remington's Pharmaceutical Sciences, Mack Publishing Co., Easton, Pa., 1985, p. 271).

[0630] The phenomenological approach utilizing phase diagrams has been extensively studied and has yielded a comprehensive knowledge, to one skilled in the art, of how to formulate microemulsions (see e.g., Ansel's Pharmaceutical Dosage Forms and Drug Delivery Systems, Allen, LV., Popovich NG., and Ansel H C., 2004, Lippincott Williams & Wilkins (8th ed.), New York, NY; Rosoff, in Pharmaceutical Dosage Forms, Lieberman, Rieger and Banker (Eds.), 1988, Marcel Dekker, Inc., New York, N.Y., volume 1, p. 245; Block, in Pharmaceutical Dosage Forms, Lieberman, Rieger and Banker (Eds.), 1988, Marcel Dekker, Inc., New York, N.Y., volume 1, p. 335). Compared to conventional emulsions, microemulsions offer the advantage of solubilizing water-insoluble drugs in a formulation of thermodynamically stable droplets that are formed spontaneously.

[0631] Surfactants used in the preparation of microemulsions include, but are not limited to, ionic surfactants, non-ionic surfactants, Brij 96, polyoxyethylene oleyl ethers, polyglycerol fatty acid esters, tetraglycerol monolaurate (ML310), tetraglycerol monooleate (MO310), hexaglycerol monooleate (PO310), hexaglycerol pentaoleate (P0500), decaglycerol monocaprate (MCA750), decaglycerol monooleate (MO750), decaglycerol sequioleate (SO750), decaglycerol decaoleate (DAO750), alone or in combination with cosurfactants. The cosurfactant, usually a short-chain alcohol such as ethanol, 1-propanol, and 1-butanol, serves to increase the interfacial fluidity by penetrating into the surfactant film and consequently creating a disordered film because of the void space generated among surfactant molecules. Microemulsions can, however, be prepared without the use of cosurfactants and alcohol-free self-emulsifying microemulsion systems are known in the art. The aqueous phase can typically be, but is not limited to, water, an aqueous solution of the drug, glycerol, PEG300, PEG400, polyglycerols, propylene glycols, and derivatives of ethylene glycol. The oil phase can include, but is not limited to, materials such as Captex 300, Captex 355, Capmul MCM, fatty acid esters, medium chain (C8-C12) mono, di, and tri-glycerides, polyoxyethylated glyceryl fatty acid esters, fatty alcohols, polyglycolized glycerides, saturated polyglycolized C8-C10 glycerides, vegetable oils and silicone oil.

[0632] Microemulsions are particularly of interest from the standpoint of drug solubilization and the enhanced absorption of drugs. Lipid based microemulsions (both o/w and w/o) have been proposed to enhance the oral bioavailability of drugs, including peptides (see e.g., U.S. Pat. Nos. 6,191,105; 7,063,860; 7,070,802; 7,157,099; Constantinides et al., Pharmaceutical Research, 1994, 11, 1385-1390; Ritschel, Meth. Find. Exp. Clin. Pharmacol., 1993, 13, 205). Microemulsions afford advantages of improved drug solubilization, protection of drug from enzymatic hydrolysis, possible enhancement of drug absorption due to surfactant-induced alterations in membrane fluidity and permeability, ease of preparation, ease of oral administration over solid dosage forms, improved clinical potency, and decreased toxicity (see e.g., U.S. Pat. Nos. 6,191,105; 7,063,860; 7,070,802; 7,157,099; Constantinides et al., Pharmaceutical Research, 1994, 11, 1385; Ho et al., J. Pharm. Sci., 1996, 85, 138-143). Often microemulsions can form spontaneously when their components are brought together at ambient temperature. This can be particularly advantageous when formulating thermolabile drugs, peptides or RNAi agents. Microemulsions have also been effective in the transdermal delivery of active components in both cosmetic and pharmaceutical applications. It is expected that the microemulsion compositions and formulations of the present disclosure will facilitate the increased systemic absorption of RNAi agents and nucleic acids from the gastrointestinal tract, as well as improve the local cellular uptake of RNAi agents and nucleic acids.

[0633] Microemulsions of the present disclosure can also contain additional components and additives such as sorbitan monostearate (Grill 3), Labrasol, and penetration enhancers to improve the properties of the formulation and to enhance the absorption of the RNAi agents and nucleic acids of the present disclosure. Penetration enhancers used in the microemulsions of the present disclosure can be classified as belonging to one of five broad categories—surfactants, fatty acids, bile salts, chelating agents, and non-chelating non-surfactants (Lee et al., Critical Reviews in Therapeutic Drug Carrier Systems, 1991, p. 92). Each of these classes has been discussed above.

[0634] iii. Microparticles

[0635] An RNAi agent of the disclosure may be incorporated into a particle, e.g., a microparticle. Microparticles can be produced by spray-drying, but may also be produced by other methods including lyophilization, evaporation, fluid bed drying, vacuum drying, or a combination of these techniques.

[0636] iv. Penetration Enhancers

[0637] In one embodiment, the present disclosure employs various penetration enhancers to effect the efficient delivery of nucleic acids, particularly RNAi agents, to the skin of animals. Most drugs are present in solution in both ionized and nonionized forms. However, usually only lipid soluble or lipophilic drugs readily cross cell membranes. It has been discovered that even non-lipophilic drugs can cross cell membranes if the membrane to be crossed is treated with a penetration enhancer. In addition to aiding the diffusion of non-lipophilic drugs across cell membranes, penetration enhancers also enhance the permeability of lipophilic drugs.

[0638] Penetration enhancers can be classified as belonging to one of five broad categories, i.e., surfactants, fatty acids, bile salts, chelating agents, and non-chelating non-surfactants (see e.g., Malmsten, M. Surfactants and polymers in drug delivery, Informa Health Care, New York, NY, 2002; Lee et al., Critical Reviews in Therapeutic Drug Carrier Systems, 1991, p. 92). Each of the above mentioned classes of penetration enhancers are described below in greater detail.

[0639] Surfactants (or “surface-active agents”) are chemical entities which, when dissolved in an aqueous solution, reduce the surface tension of the solution or the interfacial tension between the aqueous solution and another liquid, with the result that absorption of RNAi agents through the mucosa is enhanced. In addition to bile salts and fatty acids, these penetration enhancers include, for example, sodium lauryl sulfate, polyoxyethylene-9-lauryl ether and polyoxyethylene-20-cetyl ether) (see e.g., Malmsten, M. Surfactants and polymers in drug delivery, Informa Health Care, New York, NY, 2002; Lee et al., Critical Reviews in Therapeutic Drug Carrier Systems, 1991, p. 92); and perfluorochemical emulsions, such as FC-43. Takahashi et al., J. Pharm. Pharmacol., 1988, 40, 252).

[0640] Various fatty acids and their derivatives which act as penetration enhancers include, for example, oleic acid, lauric acid, capric acid (n-decanoic acid), myristic acid, palmitic acid, stearic acid, linoleic acid, linolenic acid, dicaprate, tricaprate, monoolein (1-monooleoyl-rac-glycerol), dilaurin, caprylic acid, arachidonic acid, glycerol 1-monocaprate, 1-dodecylazacycloheptan-2-one, acylcarnitines, acylcholines, C₁₋₂₀ alkyl esters thereof (e.g., methyl, isopropyl and t-butyl), and mono- and di-glycerides thereof (i.e., oleate, laurate, caprate, myristate, palmitate, stearate, linoleate, etc.) (see e.g., Touitou, E., et al. Enhancement in Drug Delivery, CRC Press, Danvers, M A, 2006; Lee et al., Critical Reviews in Therapeutic Drug Carrier Systems, 1991, p. 92; Muranishi, Critical Reviews in Therapeutic Drug Carrier Systems, 1990, 7, 1-33; El Hariri et al., J. Pharm. Pharmacol., 1992, 44, 651-654).

[0641] The physiological role of bile includes the facilitation of dispersion and absorption of lipids and fat-soluble vitamins (see e.g., Malmsten, M. Surfactants and polymers in drug delivery, Informa Health Care, New York, NY, 2002; Brunton, Chapter 38 in: Goodman & Gilman's The Pharmacological Basis of Therapeutics, 9th Ed., Hardman et al. Eds., McGraw-Hill, New York, 1996, pp. 934-935). Various natural bile salts, and their synthetic derivatives, act as penetration enhancers. Thus the term “bile salts” includes any of the naturally occurring components of bile as well as any of their synthetic derivatives. Suitable bile salts include, for example, cholic acid (or its pharmaceutically acceptable sodium salt, sodium cholate), dehydrocholic acid (sodium dehydrocholate), deoxycholic acid (sodium deoxycholate), glucholic acid (sodium glucholate), glycholic acid (sodium glycocholate), glycodeoxycholic acid (sodium glycodeoxycholate), taurocholic acid (sodium taurocholate), taurodeoxycholic acid (sodium taurodeoxycholate), chenodeoxycholic acid (sodium chenodeoxycholate), ursodeoxycholic acid (UDCA), sodium tauro-24,25-dihydro-fusidate (STDHF), sodium glycodihydrofusidate and polyoxyethylene-9-lauryl ether (POE) (see e.g., Malmsten, M. Surfactants and polymers in drug delivery, Informa Health Care, New York, NY, 2002; Lee et al., Critical Reviews in Therapeutic Drug Carrier Systems, 1991, page 92; Swinyard, Chapter 39 In: Remington's Pharmaceutical Sciences, 18th Ed., Gennaro, ed., Mack Publishing Co., Easton, Pa., 1990, pages 782-783; Muranishi, Critical Reviews in Therapeutic Drug Carrier Systems, 1990, 7, 1-33; Yamamoto et al., J. Pharm. Exp. Ther., 1992, 263, 25; Yamashita et al., J. Pharm. Sci., 1990, 79, 579-583).

[0642] Chelating agents, as used in connection with the present disclosure, can be defined as compounds that remove metallic ions from solution by forming complexes therewith, with the result that absorption of RNAi agents through the mucosa is enhanced. With regards to their use as penetration enhancers in the present disclosure, chelating agents have the added advantage of also serving as DNase inhibitors, as most characterized DNA nucleases require a divalent metal ion for catalysis and are thus inhibited by chelating agents (Jarrett, J. Chromatogr., 1993, 618, 315-339). Suitable chelating agents include but are not limited to disodium ethylenediaminetetraacetate (EDTA), citric acid, salicylates (e.g., sodium salicylate, 5-methoxysalicylate and homovanilate), N-acyl derivatives of collagen, laureth-9 and N-amino acyl derivatives of beta-diketones (enamines)(see e.g., Katdare, A. et al., Excipient development for pharmaceutical, biotechnology, and drug delivery, CRC Press, Danvers, M A, 2006; Lee et al., Critical Reviews in Therapeutic Drug Carrier Systems, 1991, page 92; Muranishi, Critical Reviews in Therapeutic Drug Carrier Systems, 1990, 7, 1-33; Buur et al., J. Control Rel., 1990, 14, 43-51).

[0643] As used herein, non-chelating non-surfactant penetration enhancing compounds can be defined as compounds that demonstrate insignificant activity as chelating agents or as surfactants but that nonetheless enhance absorption of RNAi agents through the alimentary mucosa (see e.g., Muranishi, Critical Reviews in Therapeutic Drug Carrier Systems, 1990, 7, 1-33). This class of penetration enhancers includes, for example, unsaturated cyclic ureas, 1-alkyl- and 1-alkenylazacyclo-alkanone derivatives (Lee et al., Critical Reviews in Therapeutic Drug Carrier Systems, 1991, page 92); and non-steroidal anti-inflammatory agents such as diclofenac sodium, indomethacin and phenylbutazone (Yamashita et al., J. Pharm. Pharmacol., 1987, 39, 621-626).

[0644] Agents that enhance uptake of RNAi agents at the cellular level can also be added to the pharmaceutical and other compositions of the present disclosure. For example, cationic lipids, such as lipofectin (Junichi et al, U.S. Pat. No. 5,705,188), cationic glycerol derivatives, and polycationic molecules, such as polylysine (WO 97/30731), are also known to enhance the cellular uptake of dsRNAs.

[0645] Other agents can be utilized to enhance the penetration of the administered nucleic acids, including glycols such as ethylene glycol and propylene glycol, pyrrols such as 2-pyrrol, azones, and terpenes such as limonene and menthone.

[0646] vi. Excipients

[0647] In contrast to a carrier compound, a “pharmaceutical carrier” or “excipient” is a pharmaceutically acceptable solvent, suspending agent or any other pharmacologically inert vehicle for delivering one or more nucleic acids to an animal. The excipient can be liquid or solid and is selected, with the planned manner of administration in mind, so as to provide for the desired bulk, consistency, etc., when combined with a nucleic acid and the other components of a given pharmaceutical composition. Typical pharmaceutical carriers include, but are not limited to, binding agents (e.g., pregelatinized maize starch, polyvinylpyrrolidone or hydroxypropyl methylcellulose, etc.); fillers (e.g., lactose and other sugars, microcrystalline cellulose, pectin, gelatin, calcium sulfate, ethyl cellulose, polyacrylates or calcium hydrogen phosphate, etc.); lubricants (e.g., magnesium stearate, talc, silica, colloidal silicon dioxide, stearic acid, metallic stearates, hydrogenated vegetable oils, corn starch, polyethylene glycols, sodium benzoate, sodium acetate, etc.); disintegrants (e.g., starch, sodium starch glycolate, etc.); and wetting agents (e.g., sodium lauryl sulphate, etc).

[0648] Pharmaceutically acceptable organic or inorganic excipients suitable for non-parenteral administration which do not deleteriously react with nucleic acids can also be used to formulate the compositions of the present disclosure. Suitable pharmaceutically acceptable carriers include, but are not limited to, water, salt solutions, alcohols, polyethylene glycols, gelatin, lactose, amylose, magnesium stearate, talc, silicic acid, viscous paraffin, hydroxymethylcellulose, polyvinylpyrrolidone and the like.

[0649] Formulations for topical administration of nucleic acids can include sterile and non-sterile aqueous solutions, non-aqueous solutions in common solvents such as alcohols, or solutions of the nucleic acids in liquid or solid oil bases. The solutions can also contain buffers, diluents and other suitable additives. Pharmaceutically acceptable organic or inorganic excipients suitable for non-parenteral administration which do not deleteriously react with nucleic acids can be used.

[0650] Suitable pharmaceutically acceptable excipients include, but are not limited to, water, salt solutions, alcohol, polyethylene glycols, gelatin, lactose, amylose, magnesium stearate, talc, silicic acid, viscous paraffin, hydroxymethylcellulose, polyvinylpyrrolidone and the like.

[0651] vii. Other Components

[0652] The compositions of the present disclosure can additionally contain other adjunct components conventionally found in pharmaceutical compositions, at their art-established usage levels. Thus, for example, the compositions can contain additional, compatible, pharmaceutically-active materials such as, for example, antipruritics, astringents, local anesthetics or anti-inflammatory agents, or can contain additional materials useful in physically formulating various dosage forms of the compositions of the present disclosure, such as dyes, flavoring agents, preservatives, antioxidants, opacifiers, thickening agents and stabilizers. However, such materials, when added, should not unduly interfere with the biological activities of the components of the compositions of the present disclosure. The formulations can be sterilized and, if desired, mixed with auxiliary agents, e.g., lubricants, preservatives, stabilizers, wetting agents, emulsifiers, salts for influencing osmotic pressure, buffers, colorings, flavorings or aromatic substances and the like which do not deleteriously interact with the nucleic acid(s) of the formulation.

[0653] Aqueous suspensions can contain substances which increase the viscosity of the suspension including, for example, sodium carboxymethylcellulose, sorbitol or dextran. The suspension can also contain stabilizers.

[0654] In some embodiments, pharmaceutical compositions featured in the disclosure include (a) one or more RNAi agents and (b) one or more agents which function by a non-RNAi mechanism and which are useful in treating a GPR75-associated disorder. Examples of such agents include, but are not limited to an antiviral agent, an immune stimulator, a therapeutic vaccine, a viral entry inhibitor, and a combination of any of the foregoing.

[0655] Toxicity and therapeutic efficacy of such compounds can be determined by standard pharmaceutical procedures in cell cultures or experimental animals, e.g., for determining the LD₅₀ (the dose lethal to 50% of the population) and the ED₅₀ (the dose therapeutically effective in 50% of the population). The dose ratio between toxic and therapeutic effects is the therapeutic index and it can be expressed as the ratio LD₅₀/ED₅₀. Compounds that exhibit high therapeutic indices are preferred.

[0656] The data obtained from cell culture assays and animal studies can be used in formulating a range of dosage for use in humans. The dosage of compositions featured herein in the disclosure lies generally within a range of circulating concentrations that include the ED₅₀ with little or no toxicity. The dosage can vary within this range depending upon the dosage form employed and the route of administration utilized. For any compound used in the methods featured in the disclosure, the therapeutically effective dose can be estimated initially from cell culture assays. A dose can be formulated in animal models to achieve a circulating plasma concentration range of the compound or, when appropriate, of the polypeptide product of a target sequence (e.g., achieving a decreased concentration of the polypeptide) that includes the IC₅₀ (i.e., the concentration of the test compound which achieves a half-maximal inhibition of symptoms) as determined in cell culture. Such information can be used to more accurately determine useful doses in humans. Levels in plasma can be measured, for example, by high performance liquid chromatography.

[0657] In addition to their administration, as discussed above, the RNAi agents featured in the disclosure can be administered in combination with other known agents effective in treatment of pathological processes mediated by nucleotide repeat expression. In any event, the administering physician can adjust the amount and timing of RNAi agent administration on the basis of results observed using standard measures of efficacy known in the art or described herein.

### VII. Kits

[0658] In certain aspects, the instant disclosure provides kits that include a suitable container containing a pharmaceutical formulation of an RNAi agent, e.g., a double-stranded RNAi agent. In certain embodiments the individual components of the pharmaceutical formulation may be provided in one container. Alternatively, it may be desirable to provide the components of the pharmaceutical formulation separately in two or more containers, e.g., one container for an RNAi agent, and at least another for a carrier compound. The kit may be packaged in a number of different configurations such as one or more containers in a single box. The different components can be combined, e.g., according to instructions provided with the kit. The components can be combined according to a method described herein, e.g., to prepare and administer a pharmaceutical composition. The kit can also include a delivery device, such as a device suitable for pulmonary administration, e.g., a device suitable for oral inhalative administration including nebulizers, metered-dose inhalers, and dry powder inhalers.

### VIII. Methods for Inhibiting GPR75 Expression

[0659] The present disclosure also provides methods of inhibiting expression of a GPR75 gene in a cell. The methods include contacting a cell with an RNAi agent, e.g., double stranded RNAi agent, in an amount effective to inhibit expression of a GPR75 gene in the cell, thereby inhibiting expression of GPR75 in the cell. In certain embodiments of the disclosure, expression of a GPR75 gene is inhibited in liver cells (e.g., hepatocytes).

[0660] Contacting of a cell with a RNAi agent, e.g., a double stranded RNAi agent, may be done in vitro or in vivo. Contacting a cell in vivo with the RNAi agent includes contacting a cell or group of cells within a subject, e.g., a human subject, with the RNAi agent. Combinations of in vitro and in vivo methods of contacting a cell are also possible.

[0661] Contacting a cell may be direct or indirect, as discussed above. Furthermore, contacting a cell may be accomplished via a targeting ligand, including any ligand described herein or known in the art. In some embodiments, the targeting ligand is a lipophilic moiety, e.g., a C16, and/or a carbohydrate moiety, e.g., a GalNAc ligand, or any other ligand that directs the RNAi agent to a site of interest. In certain embodiments, the ligand is not a cholesterol moiety. In certain embodiments, the RNAi agent does not include a targeting ligand.

[0662] The term “inhibiting,” as used herein, is used interchangeably with “reducing,” “silencing,” “downregulating,” “suppressing” and other similar terms, and includes any level of inhibition. In certain embodiments, a level of inhibition, e.g., for an RNAi agent of the instant disclosure, can be assessed in cell culture conditions, e.g., wherein cells in cell culture are transfected via Lipofectamine™-mediated transfection at a concentration in the vicinity of a cell of 10 nM or less, 1 nM or less, etc. Knockdown of a given RNAi agent can be determined via comparison of pre-treated levels in cell culture versus post-treated levels in cell culture, optionally also comparing against cells treated in parallel with a scrambled or other form of control RNAi agent. Knockdown in cell culture of, e.g., 50% or more, can thereby be identified as indicative of “inhibiting” or “reducing”, “downregulating” or “suppressing”, etc. having occurred. It is expressly contemplated that assessment of targeted mRNA or encoded protein levels (and therefore an extent of “inhibiting”, etc. caused by a RNAi agent of the disclosure) can also be assessed in in vivo systems for the RNAi agents of the instant disclosure, under properly controlled conditions as described in the art.

[0663] The phrase “inhibiting expression of a GPR75 gene” or “inhibiting expression of GPR75,” as used herein, includes inhibition of expression of any GPR75 gene (such as, e.g., a mouse GPR75 gene, a rat GPR75 gene, a monkey GPR75 gene, or a human GPR75 gene) as well as variants or mutants of a GPR75 gene that encode a GPR75 protein. Thus, the GPR75 gene may be a wild-type GPR75 gene, a mutant GPR75 gene, or a transgenic GPR75 gene in the context of a genetically manipulated cell, group of cells, or organism.

[0664] “Inhibiting expression of a GPR75 gene” includes any level of inhibition of a GPR75 gene, e.g., at least partial suppression of the expression of a GPR75 gene, such as an inhibition by at least 20%. In certain embodiments, inhibition is by at least 30%, at least 40%, at least 50%, at least about 60%, at least 70%, at least about 80%, at least 85%, at least 90%, at least 95%, at least 96%, at least 97%, at least 98%, or at least 99%; or to below the level of detection of the assay method. In one method, inhibition is measured at a 10 nM concentration of the siRNA using the luciferase assay provided in Example 1.

[0665] The expression of a GPR75 gene may be assessed based on the level of any variable associated with GPR75 gene expression, e.g., GPR75 mRNA level or GPR75 protein level.

[0666] Inhibition may be assessed by a decrease in an absolute or relative level of one or more of these variables compared with a control level. The control level may be any type of control level that is utilized in the art, e.g., a pre-dose baseline level, or a level determined from a similar subject, cell, or sample that is untreated or treated with a control (such as, e.g., buffer only control or inactive agent control).

[0667] In some embodiments of the methods of the disclosure, expression of a GPR75 gene is inhibited by at least 20%, 30%, 40%, 50%, 60%, 70%, 80%, 85%, 90%, or 95%, or to below the level of detection of the assay. In certain embodiments, the methods include a clinically relevant inhibition of expression of GPR75, e.g. as demonstrated by a clinically relevant outcome after treatment of a subject with an agent to reduce the expression of a GPR75 gene.

[0668] Inhibition of the expression of a GPR75 gene may be manifested by a reduction of the amount of mRNA expressed by a first cell or group of cells (such cells may be present, for example, in a sample derived from a subject) in which a GPR75 gene is transcribed and which has or have been treated (e.g., by contacting the cell or cells with a RNAi agent of the disclosure, or by administering a RNAi agent of the disclosure to a subject in which the cells are or were present) such that the expression of a GPR75 gene is inhibited, as compared to a second cell or group of cells substantially identical to the first cell or group of cells but which has not or have not been so treated (control cell(s) not treated with a RNAi agent or not treated with a RNAi agent targeted to the genome of interest). The degree of inhibition may be expressed in terms of:

$$\frac{( mRNA in control cells ) - ( mRNA in treated cells )}{( mRNA in control cells )} •100 \%$$

[0669] In other embodiments, inhibition of the expression of a GPR75 gene may be assessed in terms of a reduction of a parameter that is functionally linked to a GPR75 gene expression, e.g., GPR75 protein expression, S protein priming, efficiency of viral entry, viral load. GPR75 gene silencing may be determined in any cell expressing a GPR75 gene, either endogenous or heterologous from an expression construct, and by any assay known in the art.

[0670] Inhibition of the expression of a GPR75 protein may be manifested by a reduction in the level of the GPR75 protein that is expressed by a cell or group of cells (e.g., the level of protein expressed in a sample derived from a subject). As explained above, for the assessment of genome suppression, the inhibition of protein expression levels in a treated cell or group of cells may similarly be expressed as a percentage of the level of protein in a control cell or group of cells.

[0671] A control cell or group of cells that may be used to assess the inhibition of the expression of a GPR75 gene includes a cell or group of cells that has not yet been contacted with an RNAi agent of the disclosure. For example, the control cell or group of cells may be derived from an individual subject (e.g., a human or animal subject) prior to treatment of the subject with an RNAi agent.

[0672] The level of GPR75 mRNA that is expressed by a cell or group of cells may be determined using any method known in the art for assessing RNA expression. In one embodiment, the level of expression of GPR75 in a sample is determined by detecting a transcribed polynucleotide, or portion thereof, e.g., mRNA of the GPR75 gene. RNA may be extracted from cells using RNA extraction techniques including, for example, using acid phenol/guanidine isothiocyanate extraction (RNAzol B; Biogenesis), RNeasy™ RNA preparation kits (Qiagen®) or PAXgene (PreAnalytix, Switzerland). Typical assay formats utilizing ribonucleic acid hybridization include nuclear run-on assays, RT-PCR, RNase protection assays, northern blotting, in situ hybridization, and microarray analysis. Circulating GPR75 mRNA may be detected using methods the described in WO2012/177906, the entire contents of which are hereby incorporated herein by reference.

[0673] In some embodiments, the level of expression of GPR75 is determined using a nucleic acid probe. The term “probe”, as used herein, refers to any molecule that is capable of selectively binding to a specific GPR75 nucleic acid or protein, or fragment thereof. Probes can be synthesized by one of skill in the art, or derived from appropriate biological preparations. Probes may be specifically designed to be labeled. Examples of molecules that can be utilized as probes include, but are not limited to, RNA, DNA, proteins, antibodies, and organic molecules.

[0674] Isolated mRNA can be used in hybridization or amplification assays that include, but are not limited to, Southern or northern analyses, polymerase chain reaction (PCR) analyses and probe arrays. One method for the determination of RNA levels involves contacting the isolated RNA with a nucleic acid molecule (probe) that can hybridize to GPR75 RNA. In one embodiment, the RNA is immobilized on a solid surface and contacted with a probe, for example by running the isolated RNA on an agarose gel and transferring the RNA from the gel to a membrane, such as nitrocellulose. In an alternative embodiment, the probe(s) are immobilized on a solid surface and the RNA is contacted with the probe(s), for example, in an Affymetrix® gene chip array. A skilled artisan can readily adapt known RNA detection methods for use in determining the level of GPR75 mRNA.

[0675] An alternative method for determining the level of expression of GPR75 in a sample involves the process of nucleic acid amplification or reverse transcriptase (to prepare cDNA) of for example mRNA in the sample, e.g., by RT-PCR (the experimental embodiment set forth in Mullis, 1987, U.S. Pat. No. 4,683,202), ligase chain reaction (Barany (1991) Proc. Natl. Acad. Sci. USA 88:189-193), self sustained sequence replication (Guatelli et al. (1990) Proc. Natl. Acad. Sci. USA 87:1874-1878), transcriptional amplification system (Kwoh et al. (1989) Proc. Natl. Acad. Sci. USA 86:1173-1177), Q-Beta Replicase (Lizardi et al. (1988) Bio/Technology 6:1197), rolling circle replication (Lizardi et al., U.S. Pat. No. 5,854,033) or any other nucleic acid amplification method, followed by the detection of the amplified molecules using techniques well known to those of skill in the art. These detection schemes are especially useful for the detection of nucleic acid molecules if such molecules are present in very low numbers. In particular aspects of the disclosure, the level of expression of GPR75 is determined by quantitative fluorogenic RT-PCR (i.e., the TaqMan™ System), by a Dual-Glo® Luciferase assay, or by other art-recognized method for measurement of GPR75 expression or mRNA level.

[0676] The expression level of GPR75 mRNA may be monitored using a membrane blot (such as used in hybridization analysis such as northern, Southern, dot, and the like), or microwells, sample tubes, gels, beads or fibers (or any solid support comprising bound nucleic acids). See U.S. Pat. Nos. 5,770,722, 5,874,219, 5,744,305, 5,677,195 and 5,445,934, which are incorporated herein by reference. The determination of GPR75 expression level may also comprise using nucleic acid probes in solution.

[0677] In some embodiments, the level of RNA expression is assessed using branched DNA (bDNA) assays or real time PCR (qPCR). The use of this PCR method is described and exemplified in the Examples presented herein. Such methods can also be used for the detection of GPR75 nucleic acids.

[0678] The level of GPR75 protein expression may be determined using any method known in the art for the measurement of protein levels. Such methods include, for example, electrophoresis, capillary electrophoresis, high performance liquid chromatography (HPLC), thin layer chromatography (TLC), hyperdiffusion chromatography, fluid or gel precipitin reactions, absorption spectroscopy, a colorimetric assays, spectrophotometric assays, flow cytometry, immunodiffusion (single or double), immunoelectrophoresis, western blotting, radioimmunoassay (RIA), enzyme-linked immunosorbent assays (ELISAs), immunofluorescent assays, electrochemiluminescence assays, and the like. Such assays can also be used for the detection of proteins indicative of the presence or replication of GPR75 proteins.

[0679] In some embodiments, the efficacy of the methods of the disclosure in the treatment of a GPR75-related disease is assessed by a decrease in GPR75 mRNA level (e.g, by assessment of a blood GPR75 level, or otherwise).

[0680] In some embodiments, the efficacy of the methods of the disclosure in the treatment of a GPR75-related disease is assessed by a decrease in GPR75 mRNA level (e.g, by assessment of a liver sample for GPR75 level, by biopsy, or otherwise).

[0681] In some embodiments of the methods of the disclosure, the RNAi agent is administered to a subject such that the RNAi agent is delivered to a specific site within the subject. The inhibition of expression of GPR75 may be assessed using measurements of the level or change in the level of GPR75 mRNA or GPR75 protein in a sample derived from a specific site within the subject, e.g., liver cells. In certain embodiments, the methods include a clinically relevant inhibition of expression of GPR75, e.g. as demonstrated by a clinically relevant outcome after treatment of a subject with an agent to reduce the expression of GPR75.

[0682] As used herein, the terms detecting or determining a level of an analyte are understood to mean performing the steps to determine if a material, e.g., protein, RNA, is present. As used herein, methods of detecting or determining include detection or determination of an analyte level that is below the level of detection for the method used.

### IX. Methods of Treating or Preventing GPR75-Associated Diseases

[0683] The present disclosure also provides methods of using a RNAi agent of the disclosure or a composition containing a RNAi agent of the disclosure to reduce or inhibit GPR75 expression in a cell. The methods include contacting the cell with a dsRNA of the disclosure and maintaining the cell for a time sufficient to obtain degradation of the mRNA transcripts of a GPR75 gene, thereby inhibiting expression of the GPR75 gene in the cell. Reduction in gene expression can be assessed by any methods known in the art. For example, a reduction in the expression of GPR75 may be determined by determining the mRNA expression level of a GPR75 gene using methods routine to one of ordinary skill in the art, e.g., northern blotting, qRT-PCR; by determining the protein level of a GPR75 protein using methods routine to one of ordinary skill in the art, such as western blotting, immunological techniques.

[0684] In the methods of the disclosure the cell may be contacted in vitro or in vivo, i.e., the cell may be within a subject.

[0685] A cell suitable for treatment using the methods of the disclosure may be any cell that expresses a GPR75 gene. A cell suitable for use in the methods of the disclosure may be a mammalian cell, e.g., a primate cell (such as a human cell or a non-human primate cell, e.g., a monkey cell or a chimpanzee cell), a non-primate cell (such as a rat cell, or a mouse cell. In one embodiment, the cell is a human cell, e.g., a human liver cell.

[0686] GPR75 expression is inhibited in the cell by at least about 30, 40, 50, 55, 60, 65, 70, 75, 80, 85, 90, 95, 96, 97, 98, 99, or about 100%, i.e., to below the level of detection. In certain embodiments, GPR75 expression is inhibited by at least 50%.

[0687] The in vivo methods of the disclosure may include administering to a subject a composition containing a RNAi agent, where the RNAi agent includes a nucleotide sequence that is complementary to at least a part of an RNA transcript of the GPR75 gene of the mammal to be treated. When the organism to be treated is a mammal such as a human, the composition can be administered by any means known in the art including, but not limited to oral, intraperitoneal, or parenteral routes, including intracranial (e.g., intraventricular, intraparenchymal, and intrathecal), intravenous, intramuscular, intravitreal, subcutaneous, transdermal, airway (aerosol), nasal, rectal, and topical (including buccal and sublingual) administration. In certain embodiments, the compositions are administered by intravenous infusion or injection. In certain embodiments, the compositions are administered by subcutaneous injection. In certain embodiments, the compositions are administered by intrathecal injection.

[0688] In some embodiments, the administration is via a depot injection. A depot injection may release the RNAi agent in a consistent way over a prolonged time period. Thus, a depot injection may reduce the frequency of dosing needed to obtain a desired effect, e.g., a desired inhibition of GPR75, or a therapeutic or prophylactic effect. A depot injection may also provide more consistent serum concentrations. Depot injections may include subcutaneous injections or intramuscular injections. In certain embodiments, the depot injection is a subcutaneous injection.

[0689] In one embodiment, the double-stranded RNAi agent is administered by pulmonary system administration, e.g., intranasal administration or oral inhalative administration. Pulmonary system administration may be via a syringe, a dropper, atomization, or use of device, e.g., a passive breath driven or active power driven single/-multiple dose dry powder inhaler (DPI) device.

[0690] The mode of administration may be chosen based upon whether local or systemic treatment is desired and based upon the area to be treated. The route and site of administration may be chosen to enhance targeting.

[0691] In one aspect, the present disclosure also provides methods for inhibiting the expression of a GPR75 gene in a mammal. The methods include administering to the mammal a composition comprising a dsRNA that targets a GPR75 gene in a cell of the mammal and maintaining the mammal for a time sufficient to obtain degradation of the RNA transcript of the GPR75 gene, thereby inhibiting expression of the GPR75 gene in the cell. Reduction in genome expression can be assessed by any methods known it the art and by methods, e.g. qRT-PCR, described herein. Reduction in protein production can be assessed by any methods known it the art and by methods, e.g. ELISA, described herein.

[0692] The present disclosure further provides methods of treatment of a subject in need thereof. The treatment methods of the disclosure include administering an RNAi agent of the disclosure to a subject, e.g., a subject that would benefit from inhibition of GPR75 expression, in a therapeutically effective amount of a RNAi agent targeting a GPR75 gene or a pharmaceutical composition comprising a RNAi agent targeting a GPR75 gene.

[0693] In addition, the present disclosure provides methods of preventing, treating or inhibiting the progression of a GPR75-associated disease or disorder, e.g., a body weight disorder, e.g., obesity.

[0694] The methods include administering to the subject a therapeutically effective amount of any of the RNAi agent, e.g., dsRNA agents, or the pharmaceutical composition provided herein, thereby preventing, treating, or inhibiting the progression of the GPR75-associated disease or disorder in the subject.

[0695] An RNAi agent of the disclosure may be administered as a “free RNAi agent.” A free RNAi agent is administered in the absence of a pharmaceutical composition. The naked RNAi agent may be in a suitable buffer solution. The buffer solution may comprise acetate, citrate, prolamine, carbonate, or phosphate, or any combination thereof. In one embodiment, the buffer solution is phosphate buffered saline (PBS). The pH and osmolarity of the buffer solution containing the RNAi agent can be adjusted such that it is suitable for administering to a subject. In certain embodiments, the free RNAi agent may be formulated in water or normal saline.

[0696] Alternatively, an RNAi agent of the disclosure may be administered as a pharmaceutical composition, such as a dsRNA liposomal formulation.

[0697] Subjects that would benefit from a reduction or inhibition of GPR75 gene expression are those having a GPR75-associated disease, subjects at risk of developing a GPR75-associate disease.

[0698] The disclosure further provides methods for the use of a RNAi agent or a pharmaceutical composition thereof, e.g., for treating a subject that would benefit from reduction or inhibition of GPR75 expression, e.g., a subject having a GPR75-associated disorder, in combination with other pharmaceuticals or other therapeutic methods, e.g., with known pharmaceuticals or known therapeutic methods, such as, for example, those which are currently employed for treating these disorders. For example, in certain embodiments, an RNAi agent targeting GPR75 is administered in combination with, e.g., an agent useful in treating a GPR75-associated disorder as described elsewhere herein or as otherwise known in the art. For example, additional agents and treatments suitable for treating a subject that would benefit from reducton in GPR75 expression, e.g., a subject having a GPR75-associated disorder, may include agents currently used to treat symptoms of GPR75-associated disorder.

[0699] Examples of the additional therapeutic agents which can be used with an RNAi agent of the invention include, but are not limited to, diabetes mellitus-treating agents, diabetic complication-treating agents, cardiovascular diseases-treating agents, anti-hyperlipemic agents, hypotensive or antihypertensive agents, anti-obesity agents, nonalcoholic steatohepatitis (NASH)-treating agents, chemotherapeutic agents, immunotherapeutic agents, immunosuppressive agents, and the like. Such combination therapies may advantageously utilize lower dosages of the administered therapeutic agents, thus avoiding possible toxicities or complications associated with the various monotherapies.

[0700] Examples of agents for treating diabetes mellitus include insulin formulations (e.g., animal insulin formulations extracted from a pancreas of a cattle or a swine; a human insulin formulation synthesized by a gene engineering technology using microorganisms or methods), insulin sensitivity enhancing agents, pharmaceutically acceptable salts, hydrates, or solvates thereof (e.g., pioglitazone, troglitazone, rosiglitazone, netoglitazone, balaglitazone, rivoglitazone, tesaglitazar, farglitazar, CLX-0921, R-483, NIP-221, NIP-223, DRF-2189, GW-7282TAK-559, T-131, RG-12525, LY-510929, LY-519818, BMS-298585, DRF-2725, GW-1536, GI-262570, KRP-297, TZD18 (Merck), DRF-2655, and the like), alpha-glycosidase inhibitors (e.g., voglibose, acarbose, miglitol, emiglitate and the like), biguanides (e.g., phenformin, metformin, buformin and the like) or sulfonylureas (e.g., tolbutamide, glibenclamide, gliclazide, chlorpropamide, tolazamide, acetohexamide, glyclopyramide, glimepiride and the like) as well as other insulin secretion-promoting agents (e.g., repaglinide, senaglinide, nateglinide, mitiglinide, GLP-1 and the like), amyrin agonist (e.g., pramlintide and the like), phosphotyrosin phosphatase inhibitor (e.g., vanadic acid and the like) and the like.

[0701] Examples of agents for treating diabetic complications include, but are not limited to, aldose reductase inhibitors (e.g., tolrestat, epalrestat, zenarestat, zopolrestat, minalrestat, fidareatat, SK-860, CT-112 and the like), neurotrophic factors (e.g., NGF, NT-3, BDNF and the like), PKC inhibitors (e.g., LY-333531 and the like), advanced glycation end-product (AGE) inhibitors (e.g., ALT946, pimagedine, pyradoxamine, phenacylthiazolium bromide (ALT766) and the like), active oxygen quenching agents (e.g., thioctic acid or derivative thereof, a bioflavonoid including flavones, isoflavones, flavonones, procyanidins, anthocyanidins, pycnogenol, lutein, lycopene, vitamins E, coenzymes Q, and the like), cerebrovascular dilating agents (e.g., tiapride, mexiletene and the like).

[0702] Anti-hyperlipemic agents include, for example, statin-based compounds which are cholesterol synthesis inhibitors (e.g., pravastatin, simvastatin, lovastatin, atorvastatin, fluvastatin, rosuvastatin and the like), squalene synthetase inhibitors or fibrate compounds having a triglyceride-lowering effect (e.g., fenofibrate, gemfibrozil, bezafibrate, clofibrate, sinfibrate, clinofibrate and the like), niacin, PCSK9 inhibitors, triglyceride lowing agents or cholesterol sequesting agents.

[0703] Hypotensive agents include, for example, angiotensin converting enzyme inhibitors (e.g., captopril, enalapril, delapril, benazepril, cilazapril, enalapril, enalaprilat, fosinopril, lisinopril, moexipril, perindopril, quinapril, ramipril, trandolapril and the like) or angiotensin II antagonists (e.g., losartan, candesartan cilexetil, olmesartan medoxomil, eprosartan, valsartan, telmisartan, irbesartan, tasosartan, pomisartan, ripisartan forasartan, and the like) or calcium channel blockers (e.g., amlodipine) or aspirin.

[0704] Nonalcoholic steatohepatitis (NASH)-treating agents include, for example, ursodiol, pioglitazone, orlistat, betaine, rosiglitazone.

[0705] Anti-obesity agents include, for example, central antiobesity agents (e.g., dexfenfluramine, fenfluramine, phentermine, sibutramine, amfepramone, dexamphetamine, mazindol, phenylpropanolamine, clobenzorex and the like), gastrointestinal lipase inhibitors (e.g., orlistat and the like), beta 3-adrenoceptor agonists (e.g., CL-316243, SR-58611-A, UL-TG-307, SB-226552, AJ-9677, BMS-196085 and the like), peptide-based appetite-suppressing agents (e.g., leptin, CNTF and the like), cholecystokinin agonists (e.g., lintitript, FPL-15849 and the like) and the like.

[0706] Chemotherapeutic agents include, for example, alkylating agents (e.g., cyclophosphamide, iphosphamide and the like), metabolism antagonists (e.g., methotrexate, 5-fluorouracil and the like), anticancer antibiotics (e.g., mitomycin, adriamycin and the like), vegetable-derived anticancer agents (e.g., vincristine, vindesine, taxol and the like), cisplatin, carboplatin, etoposide and the like. Among these substances, 5-fluorouracil derivatives such as furtulon and neofurtulon are preferred.

[0707] Immunotherapeutic agents include, for example, microorganisms or bacterial components (e.g., muramyl dipeptide derivative, picibanil and the like), polysaccharides having immune potentiating activity (e.g., lentinan, sizofilan, krestin and the like), cytokines obtained by a gene engineering technology (e.g., interferon, interleukin (IL) and the like), colony stimulating factors (e.g., granulocyte colony stimulating factor, erythropoetin and the like) and the like. In one embodiment, the immunotherapeutic agents are IL-1, IL-2, IL-12 and the like.

[0708] Immunosuppressive agents include, for example, calcineurin inhibitor/immunophilin modulators such as cyclosporine (Sandimmune, Gengraf, Neoral), tacrolimus (Prograf, FK506), ASM 981, sirolimus (RAPA, rapamycin, Rapamune), or its derivative SDZ-RAD, glucocorticoids (prednisone, prednisolone, methylprednisolone, dexamethasone and the like), purine synthesis inhibitors (mycophenolate mofetil, MMF, CellCept®, azathioprine, cyclophosphamide), interleukin antagonists (basiliximab, daclizumab, deoxyspergualin), lymphocyte-depleting agents such as antithymocyte globulin (Thymoglobulin, Lymphoglobuline), anti-CD3 antibody (OKT3), and the like.

[0709] The RNAi agent and additional therapeutic agents may be administered at the same time or in the same combination, e.g., intrathecally, or the additional therapeutic agent can be administered as part of a separate composition or at separate times or by another method known in the art or described herein.

[0710] In one embodiment, the method includes administering a composition featured herein such that expression of the target GPR75 gene is decreased, for at least one month. In some embodiments, expression is decreased for at least 2 months, 3 months, or 6 months.

[0711] In certain embodiments, administration includes a loading dose administered at a higher frequency, e.g., once per day, twice per week, once per week, for an initial dosing period, e.g., 2-4 doses.

[0712] In some embodiments, the RNAi agents useful for the methods and compositions featured herein specifically target RNAs (primary or processed) of the target GPR75 gene. Compositions and methods for inhibiting the expression of these genes using RNAi agents can be prepared and performed as described herein.

[0713] Administration of the dsRNA according to the methods of the disclosure may result in a reduction of the severity, signs, symptoms, or markers of such diseases or disorders in a patient with a GPR75-associated disorder. In some embodiments, administration of the dsRNA results in a reduction in blood glucose level in a subject with a GPR75-associated disorder. In other embodiments, administration of the dsRNA results in a reduction in blood lipid level in a subject with a GPR75-associated disorder. By “reduction” in this context is meant a statistically significant or clinically significant decrease in such level. The reduction can be, for example, at least 5%, 10%, 15%, 20%, 25%, 30%, 35%, 40%, 45%, 50%, 55%, 60%, 65%, 70%, 75%, 80%, 85%, 90%, 95%, or about 100%.

[0714] Efficacy of treatment or prevention of disease can be assessed, for example by measuring disease progression, disease remission, symptom severity, reduction in pain, quality of life, dose of a medication required to sustain a treatment effect, level of a disease marker or any other measurable parameter appropriate for a given disease being treated or targeted for prevention. It is well within the ability of one skilled in the art to monitor efficacy of treatment or prevention by measuring any one of such parameters, or any combination of parameters. It is well within the ability of one skilled in the art to monitor efficacy of treatment or prevention by measuring any one of such parameters, or any combination of parameters. In connection with the administration of a RNAi agent targeting GPR75 or pharmaceutical composition thereof, “effective against” a GPR75-associated disorder indicates that administration in a clinically appropriate manner results in a beneficial effect for at least a statistically significant fraction of patients, such as an improvement of symptoms, a cure, a reduction in disease, extension of life, improvement in quality of life, or other effect generally recognized as positive by medical doctors familiar with treating GPR75-associated disorders and the related causes.

[0715] A treatment or preventive effect is evident when there is a statistically significant improvement in one or more parameters of disease status, or by a failure to worsen or to develop symptoms where they would otherwise be anticipated. As an example, a favorable change of at least 10% in a measurable parameter of disease, and such as at least 20%, 30%, 40%, 50%, or more can be indicative of effective treatment. Efficacy for a given RNAi agent drug or formulation of that drug can also be judged using an experimental animal model for the given disease as known in the art. When using an experimental animal model, efficacy of treatment is evidenced when a statistically significant reduction in a marker or symptom is observed.

[0716] Alternatively, the efficacy can be measured by a reduction in the severity of disease as determined by one skilled in the art of diagnosis based on a clinically accepted disease severity grading scale. Any positive change resulting in e.g., lessening of severity of disease measured using the appropriate scale, represents adequate treatment using a RNAi agent or RNAi agent formulation as described herein.

[0717] Subjects can be administered a therapeutic amount of dsRNA, such as about 0.01 mg/kg to about 200 mg/kg.

[0718] The RNAi agent can be administered intrathecally, via intravitreal injection, or by intravenous infusion over a period of time, on a regular basis. In certain embodiments, after an initial treatment regimen, the treatments can be administered on a less frequent basis. Administration of the RNAi agent can reduce GPR75 levels, e.g., in a cell, tissue, blood, CSF sample or other compartment of the patient by at least 20%, 30%, 40%, 50%, 55%, 60%, 65%, 70,% 75%, 80%, 85%, 90%, 95%, 96%, 97%, 98%, or at least about 99% or more. In one embodiment, administration of the RNAi agent can reduce GPR75 levels, e.g., in a cell, tissue, blood, CSF sample or other compartment of the patient by at least 50%.

[0719] Before administration of a full dose of the RNAi agent, patients can be administered a smaller dose, such as a 5% infusion reaction, and monitored for adverse effects, such as an allergic reaction. In another example, the patient can be monitored for unwanted immunostimulatory effects, such as increased cytokine (e.g., TNF-alpha or INF-alpha) levels.

[0720] Alternatively, the RNAi agent can be administered by oral administration, pulmonary administration, intravenously, i.e., by intravenous injection, or subcutaneously, i.e., by subcutaneous injection. One or more injections may be used to deliver the desired, e.g., monthly dose of RNAi agent to a subject. The injections may be repeated over a period of time. The administration may be repeated on a regular basis. In certain embodiments, after an initial treatment regimen, the treatments can be administered on a less frequent basis. A repeat-dose regimine may include administration of a therapeutic amount of RNAi agent on a regular basis, such as monthly or extending to once a quarter, twice per year, once per year. In certain embodiments, the RNAi agent is administered about once per month to about once per quarter (i.e., about once every three months).

[0721] Unless otherwise defined, all technical and scientific terms used herein have the same meaning as commonly understood by one of ordinary skill in the art to which this invention belongs. Although methods and materials similar or equivalent to those described herein can be used in the practice or testing of the RNAi agents and methods featured in the invention, suitable methods and materials are described below. All publications, patent applications, patents, and other references mentioned herein are incorporated by reference in their entirety. In case of conflict, the present specification, including definitions, will control. In addition, the materials, methods, and examples are illustrative only and not intended to be limiting.

[0722] An informal Sequence Listing is filed herewith and forms part of the specification as filed.

[0723] This invention is further illustrated by the following examples which should not be construed as limiting. The entire contents of all references, patents and published patent applications cited throughout this application, as well as the Figures and the Sequence Listing, are hereby incorporated herein by reference.

### EXAMPLES

### Example 1. iRNA Synthesis

### Source of Reagents

[0724] Where the source of a reagent is not specifically given herein, such reagent can be obtained from any supplier of reagents for molecular biology at a quality/purity standard for application in molecular biology.

siRNA Design

[0725] The selection of siRNA designs targeting human G Protein-Coupled Receptor 75 (GPR75) gene (human NCBI refseqID: NM_006794.4; NCBI GeneID: 1) were designed using custo R and Python scripts. The human NM_006794.4 REFSEQ mRNA has a length of 2094 bases.

[0726] A detailed list of a set of the unmodified siRNA sense and antisense strand sequences targeting GPR75 is shown in Table 2.

[0727] A detailed list of a set of the modified siRNA sense and antisense strand sequences targeting GPR75 is shown in Table 3.

[0728] It is to be understood that, throughout the application, a duplex name without a decimal is equivalent to a duplex name with a decimal which merely references the batch number of the duplex. For example, AD-1230521 is equivalent to AD-1230521.

siRNA Synthesis

[0729] siRNAs were synthesized and annealed using routine methods known in the art. Briefly, siRNA sequences were synthesized on a 1 μmol scale using a Mermade 192 synthesizer (BioAutomation) with phosphoramidite chemistry on solid supports. The solid support was controlled pore glass (500-1000 Å) loaded with a custom GalNAc ligand (3′-GalNAc conjugates), universal solid support (AM Chemicals), or the first nucleotide of interest. Ancillary synthesis reagents and standard 2-cyanoethyl phosphoramidite monomers (2′-deoxy-2′-fluoro, 2′-O-methyl, RNA, DNA) were obtained from Thermo-Fisher (Milwaukee, WI), Hongene (China), or Chemgenes (Wilmington, MA, USA). Additional phosphoramidite monomers were procured from commercial suppliers, prepared in-house, or procured using custom synthesis from various CMOs. Phosphoramidites were prepared at a concentration of 100 mM in either acetonitrile or 9:1 acetonitrile:DMF and were coupled using 5-Ethylthio-1H-tetrazole (ETT, 0.25 M in acetonitrile) with a reaction time of 400 s. Phosphorothioate linkages were generated using a 100 mM solution of 3-((Dimethylamino-methylidene) amino)-3H-1,2,4-dithiazole-3-thione (DDTT, obtained from Chemgenes (Wilmington, MA, USA)) in anhydrous acetonitrile/pyridine (9:1 v/v). Oxidation time was 5 minutes. All sequences were synthesized with final removal of the DMT group (“DMT-Off”).

[0730] Upon completion of the solid phase synthesis, solid-supported oligoribonucleotides were treated with 300 μL of Methylamine (40% aqueous) at room temperature in 96 well plates for approximately 2 hours to afford cleavage from the solid support and subsequent removal of all additional base-labile protecting groups. For sequences containing any natural ribonucleotide linkages (2′-OH) protected with a tert-butyl dimethyl silyl (TBDMS) group, a second deprotection step was performed using TEA.3HF (triethylamine trihydrofluoride). To each oligonucleotide solution in aqueous methylamine was added 200 μL of dimethyl sulfoxide (DMSO) and 300 μL TEA.3HF and the solution was incubated for approximately 30 mins at 60° C. After incubation, the plate was allowed to come to room temperature and crude oligonucleotides were precipitated by the addition of 1 mL of 9:1 acetontrile:ethanol or 1:1 ethanol:isopropanol. The plates were then centrifuged at 4° C. for 45 mins and the supernatant carefully decanted with the aid of a multichannel pipette. The oligonucleotide pellet was resuspended in 20 mM NaOAc and subsequently desalted using a HiTrap size exclusion column (5 mL, GE Healthcare) on an Agilent LC system equipped with an autosampler, UV detector, conductivity meter, and fraction collector. Desalted samples were collected in 96 well plates and then analyzed by LC-MS and UV spectrometry to confirm identity and quantify the amount of material, respectively.

[0731] Duplexing of single strands was performed on a Tecan liquid handling robot. Sense and antisense single strands were combined in an equimolar ratio to a final concentration of 10 μM in 1×PBS in 96 well plates, the plate sealed, incubated at 100° C. for 10 minutes, and subsequently allowed to return slowly to room temperature over a period of 2-3 hours. The concentration and identity of each duplex was confirmed and then subsequently utilized for in vitro screening assays.

### Example 2. In Vitro Screening of siRNA Duplexes

### Cell Culture and Transfections

[0732] Cells are cultured according to standard methods and are transfected with the iRNA duplex of interest. For example, primary human hepatocytes (PHH) are transfected by adding 7.5 μL of Opti-MEM plus 0.1 μL of RNAiMAX per well (Invitrogen, Carlsbad CA. cat #13778-150) to 2.5 μL of each siRNA duplex to an individual well in a 384-well plate. The cells are then incubated at room temperature for 15 minutes. Forty μL of MEDIA containing ˜1.5×10⁴ cells is then added to the siRNA mixture. Cells are incubated for 24 hours prior to RNA purification. Single dose xperiments were performed at 10 nM, 1 nM, and 0.1 nM.

[0733] Total RNA Isolation Using DYNABEADS mRNA Isolation Kit

[0734] Total RNA isolation is performed using DYNABEADS. Briefly, cells are lysed in 10 μl of Lysis/Binding Buffer containing 3 μL of beads per well are mixed for 10 minutes on an electrostatic shaker. The washing steps are automated on a Biotek EL406, using a magnetic plate support. Beads are washed (in 3 μL) once in Buffer A, once in Buffer B, and twice in Buffer E, with aspiration steps in between. Following a final aspiration, complete 12 μL RT mixture is added to each well, as described below.

[0735] cDNA Synthesis

[0736] For cDNA synthesis, a master mix of 1.5 μl 10× Buffer, 0.6 μl 10× dNTPs, 1.5 μl Random primers, 0.75 μl Reverse Transcriptase, 0.75 μl RNase inhibitor and 9.9 μl of H₂O per reaction are added per well. Plates are sealed, agitated for 10 minutes on an electrostatic shaker, and then incubated at 37 degrees C. for 2 hours. Following this, the plates are agitated at 80 degrees C. for 8 minutes.

[0737] Real Time PCR

[0738] Two microlitre (μl) of cDNA are added to a master mix containing 0.5 μl of human GAPDH TaqMan Probe (4326317E), 0.5 μl human GPR75, 2 μl nuclease-free water and 5 μl Lightcycler 480 probe master mix (Roche Cat #04887301001) per well in a 384 well plates (Roche cat #04887301001). Real time PCR is done in a LightCycler480 Real Time PCR system (Roche).

[0739] To calculate relative fold change, data are analyzed using the ΔΔCt method and normalized to assays performed with cells transfected with 10 nM AD-1955, or mock transfected cells. IC₅₀s are calculated using a 4 parameter fit model using XLFit and normalized to cells transfected with AD-1955 or mock-transfected. The sense and antisense sequences of AD-1955 are: sense: cuuAcGcuGAGuAcuucGAdTsdT (SEQ ID NO:13) and antisense

(SEQ ID NO: 14)
UCGAAGuACUcAGCGuAAGdTsdT

### In Vitro Dual-Luciferase and Endogenous Screening Assays

[0740] Hepa1-6 cells were transfected by adding 50 μL of siRNA duplexes and 75 ng of human GPR75 plasmid per well along with 100 μL of Opti-MEM plus 0.5 μL of Lipofectamine 2000 per well (Invitrogen, Carlsbad CA. cat #13778-150) and then incubated at room temperature for 15 minutes. The mixture was then added to the cells which are re-suspended in 35 μL of fresh complete media. The transfected cells were incubated at 37° C. in an atmosphere of 5% CO₂. Single-dose experiments were performed at 10 nM.

[0741] Twenty-four hours after the siRNAs and psiCHECK2 plasmid are transfected; Firefly (transfection control) and Renilla (fused to GPR75 target sequence) luciferase were measured. First, media was removed from cells. Then Firefly luciferase activity was measured by adding 75 μL of Dual-Glo® Luciferase Reagent equal to the culture medium volume to each well and mix. The mixture was incubated at room temperature for 30 minutes before luminescense (500 nm) was measured on a Spectramax (Molecular Devices) to detect the Firefly luciferase signal. Renilla luciferase activity was measured by adding 75 μL of room temperature of Dual-Glo® Stop & Glo® Reagent to each well and the plates were incubated for 10-15 minutes before luminescence was again measured to determine the Renilla luciferase signal. The Dual-Glo® Stop & Glo® Reagent quenches the firefly luciferase signal and sustained luminescence for the Renilla luciferase reaction. siRNA activity was determined by normalizing the Renilla (GPR75) signal to the Firefly (control) signal within each well. The magnitude of siRNA activity was then assessed relative to cells that were transfected with the same vector but were not treated with siRNA or were treated with a non-targeting siRNA. All transfections were done with n=4.

[0742] Total RNA Isolation Using DYNABEADS mRNA Isolation Kit

[0743] RNA was isolated using an automated protocol on a BioTek-EL406 platform using DYNABEADs (Invitrogen, cat #61012). Briefly, 70 μL of Lysis/Binding Buffer and 10 μL of lysis buffer containing 3 μL of magnetic beads were added to the plate with cells. Plates were incubated on an electromagnetic shaker for 10 minutes at room temperature and then magnetic beads were captured and the supernatant was removed. Bead-bound RNA was then washed 2 times with 150 μL Wash Buffer A and once with Wash Buffer B. Beads were then washed with 150 μL Elution Buffer, re-captured and supernatant removed.

[0744] cDNA Synthesis Using ABI High Capacity cDNA Reverse Transcription Kit (Applied Biosystems, Foster City, CA, Cat #4368813)

[0745] Ten μL of a master mix containing 1 μL 10× Buffer, 0.4 μL 25× dNTPs, 1 μL 10× Random primers, 0.5 μL Reverse Transcriptase, 0.5 μL RNase inhibitor and 6.6 μL of H₂O per reaction was added to RNA isolated above. Plates were sealed, mixed, and incubated on an electromagnetic shaker for 10 minutes at room temperature, followed by 2 hour incubation at 37° C.

[0746] Real Time PCR

[0747] Two μL of cDNA were added to a master mix containing 0.5 μL of human or mouse GAPDH TaqMan Probe (ThermoFisher cat 4352934E or 4351309) and 0.5 μL of appropriate GPR75 probe (commercially available, e.g., from Thermo Fisher) and 5 μL Lightcycler 480 probe master mix (Roche Cat #04887301001) per well in a 384 well plates (Roche cat #04887301001). Real time PCR was done in a LightCycler480 Real Time PCR system (Roche). Each duplex was tested with N=4 and data were normalized to cells transfected with a non-targeting control siRNA. To calculate relative fold change, real time data were analyzed using the ΔΔCt method and normalized to assays performed with cells transfected with a non-targeting control siRNA.

[0748] The results of the in vitro screen of a subset of the dsRNA agents listed in Tables 2 and 3 in Hepa1-6 cells are shown in Table 4.

Table 1. Abbreviations of nucleotide monomers used in nucleic acid sequence representation. It will be understood that these monomers, when present in an oligonucleotide, are mutually linked by 5′-3′-phosphodiester bonds; and it is understood that when the nucleotide contains a 2′-fluoro modification, then the fluoro replaces the hydroxy at that position in the parent nucleotide (i.e., it is a 2′-deoxy-2′-fluoronucleotide).

| Abbreviation | Nucleotide(s) |
|---|---|
| A | Adenosine-3′-phosphate |
| Ab | beta-L-adenosine-3′-phosphate |
| Abs | beta-L-adenosine-3′-phosphorothioate |
| Af | 2′-fluoroadenosine-3′-phosphate |
| Afs | 2′-fluoroadenosine-3′-phosphorothioate |
| As | adenosine-3′-phosphorothioate |
| C | cytidine-3′-phosphate |
| Cb | beta-L-cytidine-3 -phosphate |
| Cbs | beta-L-cytidine-3′-phosphorothioate |
| Cf | 2′-fluorocytidine-3′-phosphate |
| Cfs | 2′-fluorocytidine-3′-phosphorothioate |
| Cs | cytidine-3′-phosphorothioate |
| G | guanosine-3′-phosphate |
| Gb | beta-L-guanosine-3′-phosphate |
| Gbs | beta-L-guanosine-3′-phosphorothioate |
| Gf | 2′-fluoroguanosine-3′-phosphate |
| Gfs | 2′-fluoroguanosine-3′-phosphorothioate |
| Gs | guanosine-3′-phosphorothioate |
| T | 5′-methyluridine-3′-phosphate |
| Tf | 2′-fluoro-5-methyluridine-3′-phosphate |
| Tfs | 2′-fluoro-5-methyluridine-3′-phosphorothioate |
| Ts | 5-methyluridine-3′-phosphorothioate |
| U | Uridine-3′-phosphate |
| Uf | 2′-fluorouridine-3′-phosphate |
| Ufs | 2′-fluorouridine-3′-phosphorothioate |
| Us | uridine-3′-phosphorothioate |
| N | any nucleotide, modified or unmodified |
| a | 2′-O-methyladenosine-3′-phosphate |
| as | 2′-O-methyladenosine-3′-phosphorothioate |
| C | 2′-O-methylcytidine-3′-phosphate |
| CS | 2′-O-methylcytidine-3′-phosphorothioate |
| g | 2′-O-methylguanosine-3′-phosphate |
| gs | 2′-O-methylguanosine-3′- phosphorothioate |
| t | 2′-O-methyl-5-methyluridine-3′-phosphate |
| ts | 2′-O-methyl-5-methyluridine-3′-phosphorothioate |
| u | 2′-O-methyluridine-3′-phosphate |
| us | 2′-O-methyluridine-3′-phosphorothioate |
| S | phosphorothioate linkage |
| L10 | N-(cholesterylcarboxamidocaproyl)-4-hydroxyprolinol (Hyp-C6-Chol) |
| L96 | N-[tris(GalNAc-alkyl)-amidodecanoyl)]-4-hydroxyprolinol (Hyp-(GalNAc-alkyl)3) [chemical structure] |
| Y34 | 2-hydroxymethyl-tetrahydrofurane-4-methoxy-3-phosphate (abasic 2′- |
| | OMe furanose) |
| Y44 | inverted abasic DNA (2-hydroxymethyl-tetrahydrofurane-5-phosphate) |
| (Agn) | Adenosine-glycol nucleic acid (GNA) |
| (Cgn) | Cytidine-glycol nucleic acid (GNA) |
| (Ggn) | Guanosine-glycol nucleic acid (GNA) |
| (Tgn) | Thymidine-glycol nucleic acid (GNA) S-Isomer |
| P | Phosphate |
| VP | Vinyl-phosphonate |
| dA | 2′-deoxyadenosine-3′-phosphate |
| dAs | 2′-deoxyadenosine-3′-phosphorothioate |
| dC | 2′-deoxycytidine-3′-phosphate |
| dCs | 2′-deoxycytidine-3′-phosphorothioate |
| dG | 2′-deoxyguanosine-3′-phosphate |
| dGs | 2′-deoxyguanosine-3′-phosphorothioate |
| dT | 2′-deoxythymidine-3′-phosphate |
| dTs | 2′-deoxythymidine-3′-phosphorothioate |
| dU | 2′-deoxyuridine |
| dUs | 2′-deoxyuridine-3′-phosphorothioate |
| (C2p) | cytidine-2′-phosphate |
| (G2p) | guanosine-2′-phosphate |
| (U2p) | uridine-2′-phosphate |
| (A2p) | adenosine-2′-phosphate |
| (Chd) | 2′-O-hexadecyl-cytidine-3′-phosphate |
| (Ahd) | 2′-O-hexadecyl-adenosine-3′-phosphate |
| (Ghd) | 2′-O-hexadecyl-guanosine-3′-phosphate |
| (Uhd) | 2′-O-hexadecyl-uridine-3′-phosphate |

TABLE 2
Unmodified Sense and Antisense Strand GPR75 dsRNA Sequences

| | | SEQ | | | SEQ | |
|---|---|---|---|---|---|---|
| Duplex | | ID | Range in | | ID | Range in |
| Name | Sense Sequence 5′ to 3′ | NO: | NM_006794.4 | Antisense Sequence 5′ to 3′ | NO: | NM_006794.4 |
| AD- | AUGGCGAUGAUGCCUCUAGUU | 15 | 40-60 | AACUAGAGGCAUCAUCGCCAUCG | 555 | 38-60 |
| 1423452 | | | | | | |
| AD- | UGAUGCCUCUAGUCCUGCAUU | 16 | 47-67 | AAUGCAGGACUAGAGGCAUCAUC | 556 | 45-67 |
| 1423459 | | | | | | |
| AD- | CCUCUAGUCCUGCAUCAUCCU | 17 | 52-72 | AGGAUGAUGCAGGACUAGAGGCA | 557 | 50-72 |
| 1423464 | | | | | | |
| AD- | GUCCUGCAUCAUCCAGAGCGU | 18 | 58-78 | ACGCUCUGGAUGAUGCAGGACUA | 558 | 56-78 |
| 1423470 | | | | | | |
| AD- | CCGGACUGCGAGAUGGAGGAU | 19 | 95-115 | AUCCUCCAUCUCGCAGUCCGGAC | 559 | 93-115 |
| 1423485 | | | | | | |
| AD- | CACCCGGCAGGCUUAUCUGUU | 20 | 131-151 | AACAGAUAAGCCUGCCGGGUGGC | 560 | 129-151 |
| 1423493 | | | | | | |
| AD- | GGCAGGCUUAUCUGUCUUGGU | 21 | 136-156 | ACCAAGACAGAUAAGCCUGCCGG | 561 | 134-156 |
| 1423498 | | | | | | |
| AD- | AUCUGUCUUGGGCCUCUUUUU | 22 | 145-165 | AAAAAGAGGCCCAAGACAGAUAA | 562 | 143-165 |
| 1423507 | | | | | | |
| AD- | UCUUGGGCCUCUUUUGUCACU | 23 | 150-170 | AGUGACAAAAGAGGCCCAAGACA | 563 | 148-170 |
| 1423512 | | | | | | |
| AD- | GGCCUCUUUUGUCACAUAUUU | 24 | 155-175 | AAAUAUGUGACAAAAGAGGCCCA | 564 | 153-175 |
| 1423517 | | | | | | |
| AD- | UUUUGUCACAUAUUGCUCAUU | 25 | 161-181 | AAUGAGCAAUAUGUGACAAAAGA | 565 | 159-181 |
| 1423523 | | | | | | |
| AD- | CACAUAUUGCUCAUCUGUGAU | 26 | 167-187 | AUCACAGAUGAGCAAUAUGUGAC | 566 | 165-187 |
| 1423529 | | | | | | |
| AD- | AUUGCUCAUCUGUGAGCUGAU | 27 | 172-192 | AUCAGCUCACAGAUGAGCAAUAU | 567 | 170-192 |
| 1423534 | | | | | | |
| AD- | CAUCUGUGAGCUGAGGCCCUU | 28 | 178-198 | AAGGGCCUCAGCUCACAGAUGAG | 568 | 176-198 |
| 1423540 | | | | | | |
| AD- | GGCCCUGACUCACUGAGUAUU | 29 | 192-212 | AAUACUCAGUGAGUCAGGGCCUC | 569 | 190-212 |
| 1423554 | | | | | | |
| AD- | UGACUCACUGAGUAUUUUUGU | 30 | 197-217 | ACAAAAAUACUCAGUGAGUCAGG | 570 | 195-217 |
| 1423559 | | | | | | |
| AD- | GAGCAGAAGAAGGAGACAUUU | 31 | 219-239 | AAAUGUCUCCUUCUUCUGCUCCC | 571 | 217-239 |
| 1423563 | | | | | | |
| AD- | GAAGAAGGAGACAUUUCUCUU | 32 | 224-244 | AAGAGAAAUGUCUCCUUCUUCUG | 572 | 222-244 |
| 1423568 | | | | | | |
| AD- | GGAGACAUUUCUCUCCGAAAU | 33 | 230-250 | AUUUCGGAGAGAAAUGUCUCCUU | 573 | 228-250 |
| 1423574 | | | | | | |
| AD- | UUUCUCUCCGAAAAUGAACUU | 34 | 237-257 | AAGUUCAUUUUCGGAGAGAAAUG | 574 | 235-257 |
| 1423581 | | | | | | |
| AD- | CUCCGAAAAUGAACUCAACAU | 35 | 242-262 | AUGUUGAGUUCAUUUUCGGAGAG | 575 | 240-262 |
| 1423586 | | | | | | |
| AD- | AAAAUGAACUCAACAGGCCAU | 36 | 247-267 | AUGGCCUGUUGAGUUCAUUUUCG | 576 | 245-267 |
| 1423591 | | | | | | |
| AD- | GAACUCAACAGGCCACCUUCU | 37 | 252-272 | AGAAGGUGGCCUGUUGAGUUCAU | 577 | 250-272 |
| 1423596 | | | | | | |
| AD- | ACAGGCCACCUUCAGGAUGCU | 38 | 259-279 | AGCAUCCUGAAGGUGGCCUGUUG | 578 | 257-279 |
| 1423603 | | | | | | |
| AD- | CCACCUCGCUCCAUGUGCCUU | 39 | 287-307 | AAGGCACAUGGAGCGAGGUGGCA | 579 | 285-307 |
| 1423610 | | | | | | |
| AD- | UCGCUCCAUGUGCCUCACUCU | 40 | 292-312 | AGAGUGAGGCACAUGGAGCGAGG | 580 | 290-312 |
| 1423615 | | | | | | |
| AD- | AUGUGCCUCACUCACAGGAAU | 41 | 299-319 | AUUCCUGUGAGUGAGGCACAUGG | 581 | 297-319 |
| 1423622 | | | | | | |
| AD- | CCUCACUCACAGGAAGGAAAU | 42 | 304-324 | AUUUCCUUCCUGUGAGUGAGGCA | 582 | 302-324 |
| 1423627 | | | | | | |
| AD- | ACAGGAAGGAAACAGCACCUU | 43 | 312-332 | AAGGUGCUGUUUCCUUCCUGUGA | 583 | 310-332 |
| 1423635 | | | | | | |
| AD- | AAGGAAACAGCACCUCUCUCU | 44 | 317-337 | AGAGAGAGGUGCUGUUUCCUUCC | 584 | 315-337 |
| 1423640 | | | | | | |
| AD- | CUCUCCAGGAGGGUCUUCAGU | 45 | 332-352 | ACUGAAGACCCUCCUGGAGAGAG | 585 | 330-352 |
| 1423655 | | | | | | |
| AD- | CAGGAGGGUCUUCAGGAUCUU | 46 | 337-357 | AAGAUCCUGAAGACCCUCCUGGA | 586 | 335-357 |
| 1423660 | | | | | | |
| AD- | GGUCUUCAGGAUCUCAUCCAU | 47 | 343-363 | AUGGAUGAGAUCCUGAAGACCCU | 587 | 341-363 |
| 1423666 | | | | | | |
| AD- | UCAGGAUCUCAUCCACACAGU | 48 | 348-368 | ACUGUGUGGAUGAGAUCCUGAAG | 588 | 346-368 |
| 1423671 | | | | | | |
| AD- | UCAUCCACACAGCCACCUUGU | 49 | 356-376 | ACAAGGUGGCUGUGUGGAUGAGA | 589 | 354-376 |
| 1423679 | | | | | | |
| AD- | CACACAGCCACCUUGGUGACU | 50 | 361-381 | AGUCACCAAGGUGGCUGUGUGGA | 590 | 359-381 |
| 1423684 | | | | | | |
| AD- | AGCCACCUUGGUGACCUGUAU | 51 | 366-386 | AUACAGGUCACCAAGGUGGCUGU | 591 | 364-386 |
| 1423689 | | | | | | |
| AD- | CCUUGGUGACCUGUACUUUUU | 52 | 371-391 | AAAAAGUACAGGUCACCAAGGUG | 592 | 369-391 |
| 1423694 | | | | | | |
| AD- | GUGACCUGUACUUUUCUACUU | 53 | 376-396 | AAGUAGAAAAGUACAGGUCACCA | 593 | 374-396 |
| 1423699 | | | | | | |
| AD- | ACUUUUCUACUGGCGGUCAUU | 54 | 385-405 | AAUGACCGCCAGUAGAAAAGUAC | 594 | 383-405 |
| 1423708 | | | | | | |
| AD- | UCUACUGGCGGUCAUCUUCUU | 55 | 390-410 | AAGAAGAUGACCGCCAGUAGAAA | 595 | 388-410 |
| 1423713 | | | | | | |
| AD- | GGUCAUCUUCUGCCUGGGUUU | 56 | 399-419 | AAACCCAGGCAGAAGAUGACCGC | 596 | 397-419 |
| 1423722 | | | | | | |
| AD- | UUCUGCCUGGGUUCCUAUGGU | 57 | 406-426 | ACCAUAGGAACCCAGGCAGAAGA | 597 | 404-426 |
| 1423729 | | | | | | |
| AD- | CCUGGGUUCCUAUGGCAACUU | 58 | 411-431 | AAGUUGCCAUAGGAACCCAGGCA | 598 | 409-431 |
| 1423734 | | | | | | |
| AD- | GUUCCUAUGGCAACUUCAUUU | 59 | 416-436 | AAAUGAAGUUGCCAUAGGAACCC | 599 | 414-436 |
| 1423739 | | | | | | |
| AD- | UAUGGCAACUUCAUUGUCUUU | 60 | 421-441 | AAAGACAAUGAAGUUGCCAUAGG | 600 | 419-441 |
| 1423744 | | | | | | |
| AD- | CAACUUCAUUGUCUUCUUGUU | 61 | 426-446 | AACAAGAAGACAAUGAAGUUGCC | 601 | 424-446 |
| 1423749 | | | | | | |
| AD- | UCAUUGUCUUCUUGUCCUUCU | 62 | 431-451 | AGAAGGACAAGAAGACAAUGAAG | 602 | 429-451 |
| 1423754 | | | | | | |
| AD- | GUCUUCUUGUCCUUCUUCGAU | 63 | 436-456 | AUCGAAGAAGGACAAGAAGACAA | 603 | 434-456 |
| 1423757 | | | | | | |
| AD- | CUUGUCCUUCUUCGAUCCAGU | 64 | 441-461 | ACUGGAUCGAAGAAGGACAAGAA | 604 | 439-461 |
| 1423762 | | | | | | |
| AD- | CCUUCUUCGAUCCAGCCUUCU | 65 | 446-466 | AGAAGGCUGGAUCGAAGAAGGAC | 605 | 444-466 |
| 1423767 | | | | | | |
| AD- | GAUCCAGCCUUCAGGAAAUUU | 66 | 454-474 | AAAUUUCCUGAAGGCUGGAUCGA | 606 | 452-474 |
| 1423775 | | | | | | |
| AD- | AGCCUUCAGGAAAUUCAGAAU | 67 | 459-479 | AUUCUGAAUUUCCUGAAGGCUGG | 607 | 457-479 |
| 1423780 | | | | | | |
| AD- | UCAGGAAAUUCAGAACCAACU | 68 | 464-484 | AGUUGGUUCUGAAUUUCCUGAAG | 608 | 462-484 |
| 1423785 | | | | | | |
| AD- | AUUCAGAACCAACUUUGAUUU | 69 | 471-491 | AAAUCAAAGUUGGUUCUGAAUUU | 609 | 469-491 |
| 1423792 | | | | | | |
| AD- | AACCAACUUUGAUUUCAUGAU | 70 | 477-497 | AUCAUGAAAUCAAAGUUGGUUCU | 610 | 475-497 |
| 1423798 | | | | | | |
| AD- | UUUGAUUUCAUGAUCCUGAAU | 71 | 484-504 | AUUCAGGAUCAUGAAAUCAAAGU | 611 | 482-504 |
| 1423805 | | | | | | |
| AD- | UUCAUGAUCCUGAACCUGUCU | 72 | 490-510 | AGACAGGUUCAGGAUCAUGAAAU | 612 | 488-510 |
| 1423811 | | | | | | |
| AD- | GAUCCUGAACCUGUCCUUCUU | 73 | 495-515 | AAGAAGGACAGGUUCAGGAUCAU | 613 | 493-515 |
| 1423816 | | | | | | |
| AD- | GAACCUGUCCUUCUGUGACCU | 74 | 501-521 | AGGUCACAGAAGGACAGGUUCAG | 614 | 499-521 |
| 1423822 | | | | | | |
| AD- | UGUCCUUCUGUGACCUCUUCU | 75 | 506-526 | AGAAGAGGUCACAGAAGGACAGG | 615 | 504-526 |
| 1423827 | | | | | | |
| AD- | UUCUGUGACCUCUUCAUUUGU | 76 | 511-531 | ACAAAUGAAGAGGUCACAGAAGG | 616 | 509-531 |
| 1423832 | | | | | | |
| AD- | GACCUCUUCAUUUGUGGAGUU | 77 | 517-537 | AACUCCACAAAUGAAGAGGUCAC | 617 | 515-537 |
| 1423838 | | | | | | |
| AD- | CUUCAUUUGUGGAGUGACAGU | 78 | 522-542 | ACUGUCACUCCACAAAUGAAGAG | 618 | 520-542 |
| 1423843 | | | | | | |
| AD- | CAUGUUCACCUUUGUGUUAUU | 79 | 546-566 | AAUAACACAAAGGUGAACAUGGG | 619 | 544-566 |
| 1423846 | | | | | | |
| AD- | UCACCUUUGUGUUAUUCUUCU | 80 | 551-571 | AGAAGAAUAACACAAAGGUGAAC | 620 | 549-571 |
| 1423851 | | | | | | |
| AD- | UUUGUGUUAUUCUUCAGCUCU | 81 | 556-576 | AGAGCUGAAGAAUAACACAAAGG | 621 | 554-576 |
| 1423856 | | | | | | |
| AD- | GUUAUUCUUCAGCUCAGCCAU | 82 | 561-581 | AUGGCUGAGCUGAAGAAUAACAC | 622 | 559-581 |
| 1423861 | | | | | | |
| AD- | CAGCUCAGCCAGUAGUAUCCU | 83 | 570-590 | AGGAUACUACUGGCUGAGCUGAA | 623 | 568-590 |
| 1423870 | | | | | | |
| AD- | CAGCCAGUAGUAUCCCGGAUU | 84 | 575-595 | AAUCCGGGAUACUACUGGCUGAG | 624 | 573-595 |
| 1423875 | | | | | | |
| AD- | UAGUAUCCCGGAUGCUUUCUU | 85 | 582-602 | AAGAAAGCAUCCGGGAUACUACU | 625 | 580-602 |
| 1423882 | | | | | | |
| AD- | UCCCGGAUGCUUUCUGCUUCU | 86 | 587-607 | AGAAGCAGAAAGCAUCCGGGAUA | 626 | 585-607 |
| 1423887 | | | | | | |
| AD- | GAUGCUUUCUGCUUCACUUUU | 87 | 592-612 | AAAAGUGAAGCAGAAAGCAUCCG | 627 | 590-612 |
| 1423892 | | | | | | |
| AD- | UUUCUGCUUCACUUUCCAUCU | 88 | 597-617 | AGAUGGAAAGUGAAGCAGAAAGC | 628 | 595-617 |
| 1423897 | | | | | | |
| AD- | CACUUUCCAUCUCACCAGUUU | 89 | 606-626 | AAACUGGUGAGAUGGAAAGUGAA | 629 | 604-626 |
| 1423906 | | | | | | |
| AD- | CCAUCUCACCAGUUCAGGCUU | 90 | 612-632 | AAGCCUGAACUGGUGAGAUGGAA | 630 | 610-632 |
| 1423912 | | | | | | |
| AD- | UCACCAGUUCAGGCUUCAUCU | 91 | 617-637 | AGAUGAAGCCUGAACUGGUGAGA | 631 | 615-637 |
| 1423917 | | | | | | |
| AD- | AGUUCAGGCUUCAUCAUCAUU | 92 | 622-642 | AAUGAUGAUGAAGCCUGAACUGG | 632 | 620-642 |
| 1423922 | | | | | | |
| AD- | AGGCUUCAUCAUCAUGUCUCU | 93 | 627-647 | AGAGACAUGAUGAUGAAGCCUGA | 633 | 625-647 |
| 1423927 | | | | | | |
| AD- | UCAUCAUCAUGUCUCUGAAGU | 94 | 632-652 | ACUUCAGAGACAUGAUGAUGAAG | 634 | 630-652 |
| 1423932 | | | | | | |
| AD- | AUCAUGUCUCUGAAGACAGUU | 95 | 637-657 | AACUGUCUUCAGAGACAUGAUGA | 635 | 635-657 |
| 1423937 | | | | | | |
| AD- | UCUCUGAAGACAGUGGCAGUU | 96 | 643-663 | AACUGCCACUGUCUUCAGAGACA | 636 | 641-663 |
| 1423943 | | | | | | |
| AD- | AGUGGCAGUGAUCGCCCUGCU | 97 | 654-674 | AGCAGGGCGAUCACUGCCACUGU | 637 | 652-674 |
| 1423954 | | | | | | |
| AD- | CACCGGCUCCGGAUGGUGUUU | 98 | 673-693 | AAACACCAUCCGGAGCCGGUGCA | 638 | 671-693 |
| 1423969 | | | | | | |
| AD- | ACAGCCUAAUCGCACGGCCUU | 99 | 699-719 | AAGGCCGUGCGAUUAGGCUGUUU | 639 | 697-719 |
| 1423977 | | | | | | |
| AD- | CUAAUCGCACGGCCUCCUUUU | 100 | 704-724 | AAAAGGAGGCCGUGCGAUUAGGC | 640 | 702-724 |
| 1423982 | | | | | | |
| AD- | CGCACGGCCUCCUUUCCCUGU | 101 | 709-729 | ACAGGGAAAGGAGGCCGUGCGAU | 641 | 707-729 |
| 1423987 | | | | | | |
| AD- | CCUCCUUUCCCUGCACCGUAU | 102 | 716-736 | AUACGGUGCAGGGAAAGGAGGCC | 642 | 714-736 |
| 1423994 | | | | | | |
| AD- | UUUCCCUGCACCGUACUCCUU | 103 | 721-741 | AAGGAGUACGGUGCAGGGAAAGG | 643 | 719-741 |
| 1423999 | | | | | | |
| AD- | UGCACCGUACUCCUCACCCUU | 104 | 727-747 | AAGGGUGAGGAGUACGGUGCAGG | 644 | 725-747 |
| 1424005 | | | | | | |
| AD- | ACUCCUCACCCUGCUUCUCUU | 105 | 735-755 | AAGAGAAGCAGGGUGAGGAGUAC | 645 | 733-755 |
| 1424013 | | | | | | |
| AD- | ACCCUGCUUCUCUGGGCCACU | 106 | 742-762 | AGUGGCCCAGAGAAGCAGGGUGA | 646 | 740-762 |
| 1424020 | | | | | | |
| AD- | CUUCUCUGGGCCACCAGUUUU | 107 | 748-768 | AAAACUGGUGGCCCAGAGAAGCA | 647 | 746-768 |
| 1424026 | | | | | | |
| AD- | CUGGGCCACCAGUUUCACCCU | 108 | 753-773 | AGGGUGAAACUGGUGGCCCAGAG | 648 | 751-773 |
| 1424031 | | | | | | |
| AD- | CACCAGUUUCACCCUUGCCAU | 109 | 759-779 | AUGGCAAGGGUGAAACUGGUGGC | 649 | 757-779 |
| 1424037 | | | | | | |
| AD- | UCACCCUUGCCACCUUGGCUU | 110 | 767-787 | AAGCCAAGGUGGCAAGGGUGAAA | 650 | 765-787 |
| 1424045 | | | | | | |
| AD- | GCCACCUUGGCUACCUUGAAU | 111 | 775-795 | AUUCAAGGUAGCCAAGGUGGCAA | 651 | 773-795 |
| 1424053 | | | | | | |
| AD- | CUUGGCUACCUUGAAAACCAU | 112 | 780-800 | AUGGUUUUCAAGGUAGCCAAGGU | 652 | 778-800 |
| 1424058 | | | | | | |
| AD- | UACCUUGAAAACCAGCAAGUU | 113 | 786-806 | AACUUGCUGGUUUUCAAGGUAGC | 653 | 784-806 |
| 1424064 | | | | | | |
| AD- | AACCAGCAAGUCCCACCUCUU | 114 | 795-815 | AAGAGGUGGGACUUGCUGGUUUU | 654 | 793-815 |
| 1424073 | | | | | | |
| AD- | AAGUCCCACCUCUGUCUUCCU | 115 | 802-822 | AGGAAGACAGAGGUGGGACUUGC | 655 | 800-822 |
| 1424080 | | | | | | |
| AD- | CACCUCUGUCUUCCCAUGUCU | 116 | 808-828 | AGACAUGGGAAGACAGAGGUGGG | 656 | 806-828 |
| 1424086 | | | | | | |
| AD- | CUGUCUUCCCAUGUCCAGUCU | 117 | 813-833 | AGACUGGACAUGGGAAGACAGAG | 657 | 811-833 |
| 1424091 | | | | | | |
| AD- | UUCCCAUGUCCAGUCUGAUUU | 118 | 818-838 | AAAUCAGACUGGACAUGGGAAGA | 658 | 816-838 |
| 1424096 | | | | | | |
| AD- | CCAGUCUGAUUGCUGGAAAAU | 119 | 827-847 | AUUUUCCAGCAAUCAGACUGGAC | 659 | 825-847 |
| 1424105 | | | | | | |
| AD- | UGAUUGCUGGAAAAGGGAAAU | 120 | 833-853 | AUUUCCCUUUUCCAGCAAUCAGA | 660 | 831-853 |
| 1424111 | | | | | | |
| AD- | CUGGAAAAGGGAAAGCCAUUU | 121 | 839-859 | AAAUGGCUUUCCCUUUUCCAGCA | 661 | 837-859 |
| 1424117 | | | | | | |
| AD- | AAGGGAAAGCCAUUUUGUCUU | 122 | 845-865 | AAGACAAAAUGGCUUUCCCUUUU | 662 | 843-865 |
| 1424123 | | | | | | |
| AD- | AGCCAUUUUGUCUCUCUAUGU | 123 | 852-872 | ACAUAGAGAGACAAAAUGGCUUU | 663 | 850-872 |
| 1424130 | | | | | | |
| AD- | UUUUGUCUCUCUAUGUGGUCU | 124 | 857-877 | AGACCACAUAGAGAGACAAAAUG | 664 | 855-877 |
| 1424135 | | | | | | |
| AD- | UCUCUCUAUGUGGUCGACUUU | 125 | 862-882 | AAAGUCGACCACAUAGAGAGACA | 665 | 860-882 |
| 1424140 | | | | | | |
| AD- | UGUGGUCGACUUCACCUUCUU | 126 | 870-890 | AAGAAGGUGAAGUCGACCACAUA | 666 | 868-890 |
| 1424148 | | | | | | |
| AD- | CGACUUCACCUUCUGUGUUGU | 127 | 876-896 | ACAACACAGAAGGUGAAGUCGAC | 667 | 874-896 |
| 1424154 | | | | | | |
| AD- | ACCUUCUGUGUUGCUGUGGUU | 128 | 883-903 | AACCACAGCAACACAGAAGGUGA | 668 | 881-903 |
| 1424161 | | | | | | |
| AD- | UGUUGCUGUGGUCUCUGUCUU | 129 | 891-911 | AAGACAGAGACCACAGCAACACA | 669 | 889-911 |
| 1424169 | | | | | | |
| AD- | UGUGGUCUCUGUCUCUUACAU | 130 | 897-917 | AUGUAAGAGACAGAGACCACAGC | 670 | 895-917 |
| 1424175 | | | | | | |
| AD- | UCUCUGUCUCUUACAUCAUGU | 131 | 902-922 | ACAUGAUGUAAGAGACAGAGACC | 671 | 900-922 |
| 1424180 | | | | | | |
| AD- | UCUUACAUCAUGAUUGCUCAU | 132 | 910-930 | AUGAGCAAUCAUGAUGUAAGAGA | 672 | 908-930 |
| 1424188 | | | | | | |
| AD- | AUCAUGAUUGCUCAGACCCUU | 133 | 916-936 | AAGGGUCUGAGCAAUCAUGAUGU | 673 | 914-936 |
| 1424194 | | | | | | |
| AD- | AGACCCUGCGGAAGAACGCUU | 134 | 929-949 | AAGCGUUCUUCCGCAGGGUCUGA | 674 | 927-949 |
| 1424207 | | | | | | |
| AD- | UGCGGAAGAACGCUCAAGUCU | 135 | 935-955 | AGACUUGAGCGUUCUUCCGCAGG | 675 | 933-955 |
| 1424213 | | | | | | |
| AD- | AAGAACGCUCAAGUCAGAAAU | 136 | 940-960 | AUUUCUGACUUGAGCGUUCUUCC | 676 | 938-960 |
| 1424218 | | | | | | |
| AD- | CGCUCAAGUCAGAAAGUGCCU | 137 | 945-965 | AGGCACUUUCUGACUUGAGCGUU | 677 | 943-965 |
| 1424223 | | | | | | |
| AD- | GUAAUCACAGUCGAUGCUUCU | 138 | 970-990 | AGAAGCAUCGACUGUGAUUACAG | 678 | 968-990 |
| 1424226 | | | | | | |
| AD- | AGUCGAUGCUUCCAGACCACU | 139 | 978-998 | AGUGGUCUGGAAGCAUCGACUGU | 679 | 976-998 |
| 1424234 | | | | | | |
| AD- | GCUUCCAGACCACAGCCUUUU | 140 | 985-1005 | AAAAGGCUGUGGUCUGGAAGCAU | 680 | 983-1005 |
| 1424241 | | | | | | |
| AD- | CAGACCACAGCCUUUCAUGGU | 141 | 990-1010 | ACCAUGAAAGGCUGUGGUCUGGA | 681 | 988-1010 |
| 1424246 | | | | | | |
| AD- | GUGGAGAUCCCAUCCAGUGUU | 142 | 1028-1048 | AACACUGGAUGGGAUCUCCACCU | 682 | 1026-1048 |
| 1424265 | | | | | | |
| AD- | GAUCCCAUCCAGUGUGCCAUU | 143 | 1033-1053 | AAUGGCACACUGGAUGGGAUCUC | 683 | 1031-1053 |
| 1424270 | | | | | | |
| AD- | UGCCGGCUCUGUAUAGGAACU | 144 | 1052-1072 | AGUUCCUAUACAGAGCCGGCAUG | 684 | 1050-1072 |
| 1424289 | | | | | | |
| AD- | GCUCUGUAUAGGAACCAGAAU | 145 | 1057-1077 | AUUCUGGUUCCUAUACAGAGCCG | 685 | 1055-1077 |
| 1424294 | | | | | | |
| AD- | GUAUAGGAACCAGAAUUACAU | 146 | 1062-1082 | AUGUAAUUCUGGUUCCUAUACAG | 686 | 1060-1082 |
| 1424299 | | | | | | |
| AD- | GAACCAGAAUUACAACAAACU | 147 | 1068-1088 | AGUUUGUUGUAAUUCUGGUUCCU | 687 | 1066-1088 |
| 1424305 | | | | | | |
| AD- | AAUUACAACAAACUGCAGCAU | 148 | 1075-1095 | AUGCUGCAGUUUGUUGUAAUUCU | 688 | 1073-1095 |
| 1424312 | | | | | | |
| AD- | AACAAACUGCAGCACGUUCAU | 149 | 1081-1101 | AUGAACGUGCUGCAGUUUGUUGU | 689 | 1079-1101 |
| 1424318 | | | | | | |
| AD- | CUGCAGCACGUUCAGACCCGU | 150 | 1087-1107 | ACGGGUCUGAACGUGCUGCAGUU | 690 | 1085-1107 |
| 1424324 | | | | | | |
| AD- | CACGUUCAGACCCGUGGAUAU | 151 | 1093-1113 | AUAUCCACGGGUCUGAACGUGCU | 691 | 1091-1113 |
| 1424330 | | | | | | |
| AD- | CAGACCCGUGGAUAUACCAAU | 152 | 1099-1119 | AUUGGUAUAUCCACGGGUCUGAA | 692 | 1097-1119 |
| 1424336 | | | | | | |
| AD- | CCGUGGAUAUACCAAGAGUCU | 153 | 1104-1124 | AGACUCUUGGUAUAUCCACGGGU | 693 | 1102-1124 |
| 1424341 | | | | | | |
| AD- | GAUAUACCAAGAGUCCCAACU | 154 | 1109-1129 | AGUUGGGACUCUUGGUAUAUCCA | 694 | 1107-1129 |
| 1424346 | | | | | | |
| AD- | ACCAAGAGUCCCAACCAACUU | 155 | 1114-1134 | AAGUUGGUUGGGACUCUUGGUAU | 695 | 1112-1134 |
| 1424351 | | | | | | |
| AD- | AGUCCCAACCAACUGGUCACU | 156 | 1120-1140 | AGUGACCAGUUGGUUGGGACUCU | 696 | 1118-1140 |
| 1424357 | | | | | | |
| AD- | GCAAGCCGACUCCAGCUCGUU | 157 | 1147-1167 | AACGAGCUGGAGUCGGCUUGCUG | 697 | 1145-1167 |
| 1424364 | | | | | | |
| AD- | CGACUCCAGCUCGUAUCAGCU | 158 | 1153-1173 | AGCUGAUACGAGCUGGAGUCGGC | 698 | 1151-1173 |
| 1424370 | | | | | | |
| AD- | CUCGUAUCAGCCAUCAACCUU | 159 | 1162-1182 | AAGGUUGAUGGCUGAUACGAGCU | 699 | 1160-1182 |
| 1424379 | | | | | | |
| AD- | AGCCAUCAACCUCUCCACUGU | 160 | 1170-1190 | ACAGUGGAGAGGUUGAUGGCUGA | 700 | 1168-1190 |
| 1424387 | | | | | | |
| AD- | UCAACCUCUCCACUGCCAAGU | 161 | 1175-1195 | ACUUGGCAGUGGAGAGGUUGAUG | 701 | 1173-1195 |
| 1424392 | | | | | | |
| AD- | CUCUCCACUGCCAAGGAUUCU | 162 | 1180-1200 | AGAAUCCUUGGCAGUGGAGAGGU | 702 | 1178-1200 |
| 1424397 | | | | | | |
| AD- | UGCCAAGGAUUCCAAAGCCGU | 163 | 1188-1208 | ACGGCUUUGGAAUCCUUGGCAGU | 703 | 1186-1208 |
| 1424405 | | | | | | |
| AD- | GAUUCCAAAGCCGUGGUCACU | 164 | 1195-1215 | AGUGACCACGGCUUUGGAAUCCU | 704 | 1193-1215 |
| 1424412 | | | | | | |
| AD- | AAAGCCGUGGUCACCUGUGUU | 165 | 1201-1221 | AACACAGGUGACCACGGCUUUGG | 705 | 1199-1221 |
| 1424418 | | | | | | |
| AD- | UGGUCACCUGUGUGAUCAUUU | 166 | 1208-1228 | AAAUGAUCACACAGGUGACCACG | 706 | 1206-1228 |
| 1424425 | | | | | | |
| AD- | ACCUGUGUGAUCAUUGUGCUU | 167 | 1213-1233 | AAGCACAAUGAUCACACAGGUGA | 707 | 1211-1233 |
| 1424430 | | | | | | |
| AD- | GUGAUCAUUGUGCUGUCAGUU | 168 | 1219-1239 | AACUGACAGCACAAUGAUCACAC | 708 | 1217-1239 |
| 1424436 | | | | | | |
| AD- | GUGCUGUCAGUCCUGGUGUGU | 169 | 1228-1248 | ACACACCAGGACUGACAGCACAA | 709 | 1226-1248 |
| 1424445 | | | | | | |
| AD- | UCAGUCCUGGUGUGCUGUCUU | 170 | 1234-1254 | AAGACAGCACACCAGGACUGACA | 710 | 1232-1254 |
| 1424451 | | | | | | |
| AD- | CUGGUGUGCUGUCUUCCACUU | 171 | 1240-1260 | AAGUGGAAGACAGCACACCAGGA | 71. | 1238-1260 |
| 1424457 | | | | | | |
| AD- | UUUCCUUGGUACAGGUGGUUU | 172 | 1265-1285 | AAACCACCUGUACCAAGGAAAUC | 712 | 1263-1285 |
| 1424464 | | | | | | |
| AD- | UUGGUACAGGUGGUUCUCUCU | 173 | 1270-1290 | AGAGAGAACCACCUGUACCAAGG | 713 | 1268-1290 |
| 1424469 | | | | | | |
| AD- | GUGGUUCUCUCCAGCAAUGGU | 174 | 1279-1299 | ACCAUUGCUGGAGAGAACCACCU | 714 | 1277-1299 |
| 1424478 | | | | | | |
| AD- | UCUCCAGCAAUGGGAGCUUCU | 175 | 1286-1306 | AGAAGCUCCCAUUGCUGGAGAGA | 715 | 1284-1306 |
| 1424485 | | | | | | |
| AD- | AAUGGGAGCUUCAUUCUUUAU | 176 | 1294-1314 | AUAAAGAAUGAAGCUCCCAUUGC | 716 | 1292-1314 |
| 1424493 | | | | | | |
| AD- | UUCAUUCUUUACCAGUUUGAU | 177 | 1303-1323 | AUCAAACUGGUAAAGAAUGAAGC | 717 | 1301-1323 |
| 1424502 | | | | | | |
| AD- | CUUUACCAGUUUGAAUUGUUU | 178 | 1309-1329 | AAACAAUUCAAACUGGUAAAGAA | 718 | 1307-1329 |
| 1424508 | | | | | | |
| AD- | CAGUUUGAAUUGUUUGGAUUU | 179 | 1315-1335 | AAAUCCAAACAAUUCAAACUGGU | 719 | 1313-1335 |
| 1424514 | | | | | | |
| AD- | AAUUGUUUGGAUUUACUCUUU | 180 | 1322-1342 | AAAGAGUAAAUCCAAACAAUUCA | 720 | 1320-1342 |
| 1424520 | | | | | | |
| AD- | UCUUAUAUUUUUCAAGUCAGU | 181 | 1338-1358 | ACUGACUUGAAAAAUAUAAGAGU | 721 | 1336-1358 |
| 1424531 | | | | | | |
| AD- | UUUCAAGUCAGGAUUAAACCU | 182 | 1347-1367 | AGGUUUAAUCCUGACUUGAAAAA | 722 | 1345-1367 |
| 1424540 | | | | | | |
| AD- | GUCAGGAUUAAACCCUUUUAU | 183 | 1353-1373 | AUAAAAGGGUUUAAUCCUGACUU | 723 | 1351-1373 |
| 1424546 | | | | | | |
| AD- | AACCCUUUUAUAUAUUCUCGU | 184 | 1363-1383 | ACGAGAAUAUAUAAAAGGGUUUA | 724 | 1361-1383 |
| 1424553 | | | | | | |
| AD- | UUUUAUAUAUUCUCGGAACAU | 185 | 1368-1388 | AUGUUCCGAGAAUAUAUAAAAGG | 725 | 1366-1388 |
| 1424558 | | | | | | |
| AD- | UAUAUUCUCGGAACAGUGCAU | 186 | 1373-1393 | AUGCACUGUUCCGAGAAUAUAUA | 726 | 1371-1393 |
| 1424563 | | | | | | |
| AD- | UCUCGGAACAGUGCAGGGCUU | 187 | 1378-1398 | AAGCCCUGCACUGUUCCGAGAAU | 727 | 1376-1398 |
| 1424568 | | | | | | |
| AD- | GCAGGGCUGAGAAGGAAAGUU | 188 | 1390-1410 | AACUUUCCUUCUCAGCCCUGCAC | 728 | 1388-1410 |
| 1424580 | | | | | | |
| AD- | GCUGAGAAGGAAAGUGCUCUU | 189 | 1395-1415 | AAGAGCACUUUCCUUCUCAGCCC | 729 | 1393-1415 |
| 1424585 | | | | | | |
| AD- | GAAGGAAAGUGCUCUGGUGCU | 190 | 1400-1420 | AGCACCAGAGCACUUUCCUUCUC | 730 | 1398-1420 |
| 1424590 | | | | | | |
| AD- | CUGGUGCCUCCAAUACAUAGU | 191 | 1413-1433 | ACUAUGUAUUGGAGGCACCAGAG | 73 | 1411-1433 |
| 1424603 | | | | | | |
| AD- | CCUCCAAUACAUAGGCCUGGU | 192 | 1419-1439 | ACCAGGCCUAUGUAUUGGAGGCA | 732 | 1417-1439 |
| 1424609 | | | | | | |
| AD- | AAUACAUAGGCCUGGGUUUUU | 193 | 1424-1444 | AAAAACCCAGGCCUAUGUAUUGG | 733 | 1422-1444 |
| 1424614 | | | | | | |
| AD- | UUUCUGCUGCAAACAAAAGAU | 194 | 1443-1463 | AUCUUUUGUUUGCAGCAGAAAAA | 734 | 1441-1463 |
| 1424615 | | | | | | |
| AD- | UGCAAACAAAAGACUCGACUU | 195 | 1450-1470 | AAGUCGAGUCUUUUGUUUGCAGC | 735 | 1448-1470 |
| 1424622 | | | | | | |
| AD- | ACAAAAGACUCGACUUCGAGU | 196 | 1455-1475 | ACUCGAAGUCGAGUCUUUUGUUU | 736 | 1453-1475 |
| 1424627 | | | | | | |
| AD- | AGACUCGACUUCGAGCCAUGU | 197 | 1460-1480 | ACAUGGCUCGAAGUCGAGUCUUU | 737 | 1458-1480 |
| 1424632 | | | | | | |
| AD- | GACUUCGAGCCAUGGGAAAAU | 198 | 1466-1486 | AUUUUCCCAUGGCUCGAAGUCGA | 738 | 1464-1486 |
| 1424638 | | | | | | |
| AD- | CGAGCCAUGGGAAAAGGGAAU | 199 | 1471-1491 | AUUCCCUUUUCCCAUGGCUCGAA | 739 | 1469-1491 |
| 1424643 | | | | | | |
| AD- | CAUGGGAAAAGGGAACCUCGU | 200 | 1476-1496 | ACGAGGUUCCCUUUUCCCAUGGC | 740 | 1474-1496 |
| 1424648 | | | | | | |
| AD- | AAAGGGAACCUCGAAGUCAAU | 201 | 1483-1503 | AUUGACUUCGAGGUUCCCUUUUC | 741 | 1481-1503 |
| 1424655 | | | | | | |
| AD- | AACCUCGAAGUCAACAGAAAU | 202 | 1489-1509 | AUUUCUGUUGACUUCGAGGUUCC | 742 | 1487-1509 |
| 1424661 | | | | | | |
| AD- | GAAGUCAACAGAAACAAAUCU | 203 | 1495-1515 | AGAUUUGUUUCUGUUGACUUCGA | 743 | 1493-1515 |
| 1424667 | | | | | | |
| AD- | CAACAGAAACAAAUCCUCCCU | 204 | 1500-1520 | AGGGAGGAUUUGUUUCUGUUGAC | 744 | 1498-1520 |
| 1424672 | | | | | | |
| AD- | AAACAAAUCCUCCCAUCAUGU | 205 | 1506-1526 | ACAUGAUGGGAGGAUUUGUUUCU | 745 | 1504-1526 |
| 1424678 | | | | | | |
| AD- | AUCCUCCCAUCAUGAAACAAU | 206 | 1512-1532 | AUUGUUUCAUGAUGGGAGGAUUU | 746 | 1510-1532 |
| 1424684 | | | | | | |
| AD- | CCCAUCAUGAAACAAACUCUU | 207 | 1517-1537 | AAGAGUUUGUUUCAUGAUGGGAG | 747 | 1515-1537 |
| 1424689 | | | | | | |
| AD- | AUGAAACAAACUCUGCCUACU | 208 | 1523-1543 | AGUAGGCAGAGUUUGUUUCAUGA | 748 | 1521-1543 |
| 1424695 | | | | | | |
| AD- | ACUCUGCCUACAUGUUAUCUU | 209 | 1532-1552 | AAGAUAACAUGUAGGCAGAGUUU | 749 | 1530-1552 |
| 1424704 | | | | | | |
| AD- | GCCUACAUGUUAUCUCCAAAU | 210 | 1537-1557 | AUUUGGAGAUAACAUGUAGGCAG | 750 | 1535-1557 |
| 1424709 | | | | | | |
| AD- | CAUGUUAUCUCCAAAGCCACU | 211 | 1542-1562 | AGUGGCUUUGGAGAUAACAUGUA | 751 | 1540-1562 |
| 1424714 | | | | | | |
| AD- | UCCAAAGCCACAGAAGAAAUU | 212 | 1551-1571 | AAUUUCUUCUGUGGCUUUGGAGA | 752 | 1549-1571 |
| 1424723 | | | | | | |
| AD- | AGCCACAGAAGAAAUUUGUGU | 213 | 1556-1576 | ACACAAAUUUCUUCUGUGGCUUU | 753 | 1554-1576 |
| 1424728 | | | | | | |
| AD- | CAGAAGAAAUUUGUGGACCAU | 214 | 1561-1581 | AUGGUCCACAAAUUUCUUCUGUG | 754 | 1559-1581 |
| 1424733 | | | | | | |
| AD- | GAAAUUUGUGGACCAGGCUUU | 215 | 1566-1586 | AAAGCCUGGUCCACAAAUUUCUU | 755 | 1564-1586 |
| 1424738 | | | | | | |
| AD- | ACCAGGCUUGUGGCCCAAGUU | 216 | 1577-1597 | AACUUGGGCCACAAGCCUGGUCC | 756 | 1575-1597 |
| 1424749 | | | | | | |
| AD- | UGUGGCCCAAGUCAUUCAAAU | 217 | 1585-1605 | AUUUGAAUGACUUGGGCCACAAG | 757 | 1583-1605 |
| 1424757 | | | | | | |
| AD- | CCCAAGUCAUUCAAAAGAAAU | 218 | 1590-1610 | AUUUCUUUUGAAUGACUUGGGCC | 758 | 1588-1610 |
| 1424762 | | | | | | |
| AD- | CAUUCAAAAGAAAGUAUGGUU | 219 | 1597-1617 | AACCAUACUUUCUUUUGAAUGAC | 759 | 1595-1617 |
| 1424769 | | | | | | |
| AD- | AAAAGAAAGUAUGGUGAGUCU | 220 | 1602-1622 | AGACUCACCAUACUUUCUUUUGA | 760 | 1600-1622 |
| 1424774 | | | | | | |
| AD- | AGUAUGGUGAGUCCCAAGAUU | 221 | 1609-1629 | AAUCUUGGGACUCACCAUACUUU | 761 | 1607-1629 |
| 1424781 | | | | | | |
| AD- | UGAGUCCCAAGAUCUCUGCUU | 222 | 1616-1636 | AAGCAGAGAUCUUGGGACUCACC | 762 | 1614-1636 |
| 1424788 | | | | | | |
| AD- | CCCAAGAUCUCUGCUGGACAU | 223 | 1621-1641 | AUGUCCAGCAGAGAUCUUGGGAC | 763 | 1619-1641 |
| 1424793 | | | | | | |
| AD- | GAUCUCUGCUGGACAUCAACU | 224 | 1626-1646 | AGUUGAUGUCCAGCAGAGAUCUU | 764 | 1624-1646 |
| 1424798 | | | | | | |
| AD- | CUGCUGGACAUCAACACUGUU | 225 | 1631-1651 | AACAGUGUUGAUGUCCAGCAGAG | 765 | 1629-1651 |
| 1424803 | | | | | | |
| AD- | GACAUCAACACUGUGGUCAGU | 226 | 1637-1657 | ACUGACCACAGUGUUGAUGUCCA | 766 | 1635-1657 |
| 1424809 | | | | | | |
| AD- | ACACUGUGGUCAGAGCAGCUU | 227 | 1644-1664 | AAGCUGCUCUGACCACAGUGUUG | 767 | 1642-1664 |
| 1424816 | | | | | | |
| AD- | CAACACUCGGAUUGAACCUUU | 228 | 1674-1694 | AAAGGUUCAAUCCGAGUGUUGAU | 768 | 1672-1694 |
| 1424825 | | | | | | |
| AD- | CUCGGAUUGAACCUUACUACU | 229 | 1679-1699 | AGUAGUAAGGUUCAAUCCGAGUG | 769 | 1677-1699 |
| 1424830 | | | | | | |
| AD- | UUGAACCUUACUACAGCAUCU | 230 | 1685-1705 | AGAUGCUGUAGUAAGGUUCAAUC | 770 | 1683-1705 |
| 1424836 | | | | | | |
| AD- | CCUUACUACAGCAUCUAUAAU | 231 | 1690-1710 | AUUAUAGAUGCUGUAGUAAGGUU | 771 | 1688-1710 |
| 1424841 | | | | | | |
| AD- | CUACAGCAUCUAUAACAGCAU | 232 | 1695-1715 | AUGCUGUUAUAGAUGCUGUAGUA | 772 | 1693-1715 |
| 1424846 | | | | | | |
| AD- | CAUCUAUAACAGCAGCCCUUU | 233 | 1701-1721 | AAAGGGCUGCUGUUAUAGAUGCU | 773 | 1699-1721 |
| 1424852 | | | | | | |
| AD- | GAGAGCAGCCCAUGUAACUUU | 234 | 1729-1749 | AAAGUUACAUGGGCUGCUCUCCU | 774 | 1727-1749 |
| 1424880 | | | | | | |
| AD- | CAGCCCAUGUAACUUACAGCU | 235 | 1734-1754 | AGCUGUAAGUUACAUGGGCUGCU | 775 | 1732-1754 |
| 1424885 | | | | | | |
| AD- | AUGUAACUUACAGCCAGUAAU | 236 | 1740-1760 | AUUACUGGCUGUAAGUUACAUGG | 776 | 1738-1760 |
| 1424891 | | | | | | |
| AD- | CUUACAGCCAGUAAACUCUUU | 237 | 1746-1766 | AAAGAGUUUACUGGCUGUAAGUU | 777 | 1744-1766 |
| 1424897 | | | | | | |
| AD- | CCAGUAAACUCUUUUGGAUUU | 238 | 1753-1773 | AAAUCCAAAAGAGUUUACUGGCU | 778 | 1751-1773 |
| 1424904 | | | | | | |
| AD- | ACUCUUUUGGAUUUGCCAAUU | 239 | 1760-1780 | AAUUGGCAAAUCCAAAAGAGUUU | 779 | 1758-1780 |
| 1424911 | | | | | | |
| AD- | GAUUUGCCAAUUCAUAUAUUU | 240 | 1769-1789 | AAAUAUAUGAAUUGGCAAAUCCA | 780 | 1767-1789 |
| 1424920 | | | | | | |
| AD- | AUUCAUAUAUUGCCAUGCAUU | 241 | 1778-1798 | AAUGCAUGGCAAUAUAUGAAUUG | 781 | 1776-1798 |
| 1424929 | | | | | | |
| AD- | AUAUUGCCAUGCAUUAUCACU | 242 | 1784-1804 | AGUGAUAAUGCAUGGCAAUAUAU | 782 | 1782-1804 |
| 1424935 | | | | | | |
| AD- | AUGCAUUAUCACACCACUAAU | 243 | 1792-1812 | AUUAGUGGUGUGAUAAUGCAUGG | 783 | 1790-1812 |
| 1424943 | | | | | | |
| AD- | UAUCACACCACUAAUGACUUU | 244 | 1798-1818 | AAAGUCAUUAGUGGUGUGAUAAU | 784 | 1796-1818 |
| 1424949 | | | | | | |
| AD- | CACCACUAAUGACUUAGUGCU | 245 | 1803-1823 | AGCACUAAGUCAUUAGUGGUGUG | 785 | 1801-1823 |
| 1424954 | | | | | | |
| AD- | AAUGACUUAGUGCAGGAAUAU | 246 | 1810-1830 | AUAUUCCUGCACUAAGUCAUUAG | 786 | 1808-1830 |
| 1424961 | | | | | | |
| AD- | UUAGUGCAGGAAUAUGACAGU | 247 | 1816-1836 | ACUGUCAUAUUCCUGCACUAAGU | 787 | 1814-1836 |
| 1424967 | | | | | | |
| AD- | GCAGGAAUAUGACAGCACUUU | 248 | 1821-1841 | AAAGUGCUGUCAUAUUCCUGCAC | 788 | 1819-1841 |
| 1424972 | | | | | | |
| AD- | UAUGACAGCACUUCAGCCAAU | 249 | 1828-1848 | AUUGGCUGAAGUGCUGUCAUAUU | 789 | 1826-1848 |
| 1424979 | | | | | | |
| AD- | CACUUCAGCCAAGCAGAUUCU | 250 | 1836-1856 | AGAAUCUGCUUGGCUGAAGUGCU | 790 | 1834-1856 |
| 1424987 | | | | | | |
| AD- | CAGCCAAGCAGAUUCCAGUCU | 251 | 1841-1861 | AGACUGGAAUCUGCUUGGCUGAA | 791 | 1839-1861 |
| 1424992 | | | | | | |
| AD- | CUCCGUUUAAAGUCAUGGAGU | 252 | 1863-1883 | ACUCCAUGACUUUAAACGGAGGG | 792 | 1861-1883 |
| 1424994 | | | | | | |
| AD- | AAAGUCAUGGAGGCUAUAGGU | 253 | 1871-1891 | ACCUAUAGCCUCCAUGACUUUAA | 793 | 1869-1891 |
| 1425002 | | | | | | |
| AD- | GGAGGCUAUAGGAUCUUAUGU | 254 | 1879-1899 | ACAUAAGAUCCUAUAGCCUCCAU | 794 | 1877-1899 |
| 1425010 | | | | | | |
| AD- | CUAUAGGAUCUUAUGUAAACU | 255 | 1884-1904 | AGUUUACAUAAGAUCCUAUAGCC | 795 | 1882-1904 |
| 1425015 | | | | | | |
| AD- | GGAUCUUAUGUAAACAGUUUU | 256 | 1889-1909 | AAAACUGUUUACAUAAGAUCCUA | 796 | 1887-1909 |
| 1425020 | | | | | | |
| AD- | AAACAGUUUUUGUUUCUGAUU | 257 | 1900-1920 | AAUCAGAAACAAAAACUGUUUAC | 797 | 1898-1920 |
| 1425031 | | | | | | |
| AD- | GUUUUUGUUUCUGAUAGUAAU | 258 | 1905-1925 | AUUACUAUCAGAAACAAAAACUG | 798 | 1903-1925 |
| 1425036 | | | | | | |
| AD- | UGUUUCUGAUAGUAAUGGACU | 259 | 1910-1930 | AGUCCAUUACUAUCAGAAACAAA | 799 | 1908-1930 |
| 1425041 | | | | | | |
| AD- | CUGAUAGUAAUGGACUUUAUU | 260 | 1915-1935 | AAUAAAGUCCAUUACUAUCAGAA | 800 | 1913-1935 |
| 1425046 | | | | | | |
| AD- | AAUGGACUUUAUUCUAACUUU | 261 | 1923-1943 | AAAGUUAGAAUAAAGUCCAUUAC | 801 | 1921-1943 |
| 1425054 | | | | | | |
| AD- | UUUAUUCUAACUUGAGAUCAU | 262 | 1930-1950 | AUGAUCUCAAGUUAGAAUAAAGU | 802 | 1928-1950 |
| 1425061 | | | | | | |
| AD- | UCUAACUUGAGAUCAGUGGCU | 263 | 1935-1955 | AGCCACUGAUCUCAAGUUAGAAU | 803 | 1933-1955 |
| 1425066 | | | | | | |
| AD- | GAGAUCAGUGGCGGAUCAAAU | 264 | 1943-1963 | AUUUGAUCCGCCACUGAUCUCAA | 804 | 1941-1963 |
| 1425074 | | | | | | |
| AD- | CAGUGGCGGAUCAAAACCUAU | 265 | 1948-1968 | AUAGGUUUUGAUCCGCCACUGAU | 805 | 1946-1968 |
| 1425079 | | | | | | |
| AD- | GGAUCAAAACCUACAAGAUUU | 266 | 1955-1975 | AAAUCUUGUAGGUUUUGAUCCGC | 806 | 1953-1975 |
| 1425086 | | | | | | |
| AD- | AAAACCUACAAGAUUCAACUU | 267 | 1960-1980 | AAGUUGAAUCUUGUAGGUUUUGA | 807 | 1958-1980 |
| 1425091 | | | | | | |
| AD- | CUACAAGAUUCAACUGAAAAU | 268 | 1965-1985 | AUUUUCAGUUGAAUCUUGUAGGU | 808 | 1963-1985 |
| 1425096 | | | | | | |
| AD- | AGAUUCAACUGAAAAGUUGGU | 269 | 1970-1990 | ACCAACUUUUCAGUUGAAUCUUG | 809 | 1968-1990 |
| 1425101 | | | | | | |
| AD- | AACUGAAAAGUUGGCAGUUAU | 270 | 1976-1996 | AUAACUGCCAACUUUUCAGUUGA | 810 | 1974-1996 |
| 1425107 | | | | | | |
| AD- | AAAGUUGGCAGUUAUGGUUUU | 271 | 1982-2002 | AAAACCAUAACUGCCAACUUUUC | 811 | 1980-2002 |
| 1425113 | | | | | | |
| AD- | UGGCAGUUAUGGUUUUCUUUU | 272 | 1987-2007 | AAAAGAAAACCAUAACUGCCAAC | 812 | 1985-2007 |
| 1425118 | | | | | | |
| AD- | GUUAUGGUUUUCUUUCAUCUU | 273 | 1992-2012 | AAGAUGAAAGAAAACCAUAACUG | 813 | 1990-2012 |
| 1425123 | | | | | | |
| AD- | UUCUUUCAUCUGAUGUGUCAU | 274 | 2001-2021 | AUGACACAUCAGAUGAAAGAAAA | 814 | 1999-2021 |
| 1425132 | | | | | | |
| AD- | CAUCUGAUGUGUCAGUAUCUU | 275 | 2007-2027 | AAGAUACUGACACAUCAGAUGAA | 815 | 2005-2027 |
| 1425138 | | | | | | |
| AD- | AUGUGUCAGUAUCUGUUGAUU | 276 | 2013-2033 | AAUCAACAGAUACUGACACAUCA | 816 | 2011-2033 |
| 1425144 | | | | | | |
| AD- | CAGUAUCUGUUGAUUUGCUUU | 277 | 2019-2039 | AAAGCAAAUCAACAGAUACUGAC | 817 | 2017-2039 |
| 1425150 | | | | | | |
| AD- | GUUGAUUUGCUUUGUAGUUUU | 278 | 2027-2047 | AAAACUACAAAGCAAAUCAACAG | 818 | 2025-2047 |
| 1425158 | | | | | | |
| AD- | GCUUUGUAGUUUGUUGACAUU | 279 | 2035-2055 | AAUGUCAACAAACUACAAAGCAA | 819 | 2033-2055 |
| 1425165 | | | | | | |
| AD- | GUAGUUUGUUGACAUCUUAAU | 280 | 2040-2060 | AUUAAGAUGUCAACAAACUACAA | 820 | 2038-2060 |
| 1425170 | | | | | | |
| AD- | UUGUUGACAUCUUAAGAUUUU | 281 | 2045-2065 | AAAAUCUUAAGAUGUCAACAAAC | 821 | 2043-2065 |
| 1425175 | | | | | | |
| AD- | GACAUCUUAAGAUUUGAUGUU | 282 | 2050-2070 | AACAUCAAAUCUUAAGAUGUCAA | 822 | 2048-2070 |
| 1425180 | | | | | | |
| AD- | UUAAGAUUUGAUGUGAAAGUU | 283 | 2056-2076 | AACUUUCACAUCAAAUCUUAAGA | 823 | 2054-2076 |
| 1425186 | | | | | | |
| AD- | UUUGAUGUGAAAGUUUUAGAU | 284 | 2062-2082 | AUCUAAAACUUUCACAUCAAAUC | 824 | 2060-2082 |
| 1425192 | | | | | | |
| AD- | AUGGCGAUGAUGCCUCUAGUA | 285 | 40-60 | UACUAGAGGCAUCAUCGCCAUCG | 825 | 38-60 |
| 1425210 | | | | | | |
| AD- | UGAUGCCUCUAGUCCUGCAUA | 286 | 47-67 | UAUGCAGGACUAGAGGCAUCAUC | 826 | 45-67 |
| 1425217 | | | | | | |
| AD- | CCUCUAGUCCUGCAUCAUCCA | 287 | 52-72 | UGGAUGAUGCAGGACUAGAGGCA | 827 | 50-72 |
| 1425222 | | | | | | |
| AD- | GUCCUGCAUCAUCCAGAGCGA | 288 | 58-78 | UCGCUCUGGAUGAUGCAGGACUA | 828 | 56-78 |
| 1425228 | | | | | | |
| AD- | CCGGACUGCGAGAUGGAGGAA | 289 | 95-115 | UUCCUCCAUCUCGCAGUCCGGAC | 829 | 93-115 |
| 1425243 | | | | | | |
| AD- | CACCCGGCAGGCUUAUCUGUA | 290 | 131-151 | UACAGAUAAGCCUGCCGGGUGGC | 830 | 129-151 |
| 1425251 | | | | | | |
| AD- | GGCAGGCUUAUCUGUCUUGGA | 291 | 136-156 | UCCAAGACAGAUAAGCCUGCCGG | 831 | 134-156 |
| 1425256 | | | | | | |
| AD- | AUCUGUCUUGGGCCUCUUUUA | 292 | 145-165 | UAAAAGAGGCCCAAGACAGAUAA | 832 | 143-165 |
| 1425265 | | | | | | |
| AD- | UCUUGGGCCUCUUUUGUCACA | 293 | 150-170 | UGUGACAAAAGAGGCCCAAGACA | 833 | 148-170 |
| 1425270 | | | | | | |
| AD- | GGCCUCUUUUGUCACAUAUUA | 294 | 155-175 | UAAUAUGUGACAAAAGAGGCCCA | 834 | 153-175 |
| 1425275 | | | | | | |
| AD- | UUUUGUCACAUAUUGCUCAUA | 295 | 161-181 | UAUGAGCAAUAUGUGACAAAAGA | 835 | 159-181 |
| 1425281 | | | | | | |
| AD- | CACAUAUUGCUCAUCUGUGAA | 296 | 167-187 | UUCACAGAUGAGCAAUAUGUGAC | 836 | 165-187 |
| 1425287 | | | | | | |
| AD- | AUUGCUCAUCUGUGAGCUGAA | 297 | 172-192 | UUCAGCUCACAGAUGAGCAAUAU | 837 | 170-192 |
| 1425292 | | | | | | |
| AD- | CAUCUGUGAGCUGAGGCCCUA | 298 | 178-198 | UAGGGCCUCAGCUCACAGAUGAG | 838 | 176-198 |
| 1425298 | | | | | | |
| AD- | GGCCCUGACUCACUGAGUAUA | 299 | 192-212 | UAUACUCAGUGAGUCAGGGCCUC | 839 | 190-212 |
| 1425312 | | | | | | |
| AD- | UGACUCACUGAGUAUUUUUGA | 300 | 197-217 | UCAAAAAUACUCAGUGAGUCAGG | 840 | 195-217 |
| 1425317 | | | | | | |
| AD- | GAGCAGAAGAAGGAGACAUUA | 301 | 219-239 | UAAUGUCUCCUUCUUCUGCUCCC | 841 | 217-239 |
| 1425321 | | | | | | |
| AD- | GAAGAAGGAGACAUUUCUCUA | 302 | 224-244 | UAGAGAAAUGUCUCCUUCUUCUG | 842 | 222-244 |
| 1425326 | | | | | | |
| AD- | GGAGACAUUUCUCUCCGAAAA | 303 | 230-250 | UUUUCGGAGAGAAAUGUCUCCUU | 843 | 228-250 |
| 1425332 | | | | | | |
| AD- | UUUCUCUCCGAAAAUGAACUA | 304 | 237-257 | UAGUUCAUUUUCGGAGAGAAAUG | 844 | 235-257 |
| 1425339 | | | | | | |
| AD- | CUCCGAAAAUGAACUCAACAA | 305 | 242-262 | UUGUUGAGUUCAUUUUCGGAGAG | 845 | 240-262 |
| 1425344 | | | | | | |
| AD- | AAAAUGAACUCAACAGGCCAA | 306 | 247-267 | UUGGCCUGUUGAGUUCAUUUUCG | 846 | 245-267 |
| 1425349 | | | | | | |
| AD- | GAACUCAACAGGCCACCUUCA | 307 | 252-272 | UGAAGGUGGCCUGUUGAGUUCAU | 847 | 250-272 |
| 1425354 | | | | | | |
| AD- | ACAGGCCACCUUCAGGAUGCA | 308 | 259-279 | UGCAUCCUGAAGGUGGCCUGUUG | 848 | 257-279 |
| 1425361 | | | | | | |
| AD- | CCACCUCGCUCCAUGUGCCUA | 309 | 287-307 | UAGGCACAUGGAGCGAGGUGGCA | 849 | 285-307 |
| 1425368 | | | | | | |
| AD- | UCGCUCCAUGUGCCUCACUCA | 310 | 292-312 | UGAGUGAGGCACAUGGAGCGAGG | 850 | 290-312 |
| 1425373 | | | | | | |
| AD- | AUGUGCCUCACUCACAGGAAA | 311 | 299-319 | UUUCCUGUGAGUGAGGCACAUGG | 851 | 297-319 |
| 1425380 | | | | | | |
| AD- | CCUCACUCACAGGAAGGAAAA | 312 | 304-324 | UUUUCCUUCCUGUGAGUGAGGCA | 852 | 302-324 |
| 1425385 | | | | | | |
| AD- | ACAGGAAGGAAACAGCACCUA | 313 | 312-332 | UAGGUGCUGUUUCCUUCCUGUGA | 853 | 310-332 |
| 1425393 | | | | | | |
| AD- | AAGGAAACAGCACCUCUCUCA | 314 | 317-337 | UGAGAGAGGUGCUGUUUCCUUCC | 854 | 315-337 |
| 1425398 | | | | | | |
| AD- | CUCUCCAGGAGGGUCUUCAGA | 315 | 332-352 | UCUGAAGACCCUCCUGGAGAGAG | 855 | 330-352 |
| 1425413 | | | | | | |
| AD- | CAGGAGGGUCUUCAGGAUCUA | 316 | 337-357 | UAGAUCCUGAAGACCCUCCUGGA | 856 | 335-357 |
| 1425418 | | | | | | |
| AD- | GGUCUUCAGGAUCUCAUCCAA | 317 | 343-363 | UUGGAUGAGAUCCUGAAGACCCU | 857 | 341-363 |
| 1425424 | | | | | | |
| AD- | UCAGGAUCUCAUCCACACAGA | 318 | 348-368 | UCUGUGUGGAUGAGAUCCUGAAG | 858 | 346-368 |
| 1425429 | | | | | | |
| AD- | UCAUCCACACAGCCACCUUGA | 319 | 356-376 | UCAAGGUGGCUGUGUGGAUGAGA | 859 | 354-376 |
| 1425437 | | | | | | |
| AD- | CACACAGCCACCUUGGUGACA | 320 | 361-381 | UGUCACCAAGGUGGCUGUGUGGA | 860 | 359-381 |
| 1425442 | | | | | | |
| AD- | AGCCACCUUGGUGACCUGUAA | 321 | 366-386 | UUACAGGUCACCAAGGUGGCUGU | 861 | 364-386 |
| 1425447 | | | | | | |
| AD- | CCUUGGUGACCUGUACUUUUA | 322 | 371-391 | UAAAAGUACAGGUCACCAAGGUG | 862 | 369-391 |
| 1425452 | | | | | | |
| AD- | GUGACCUGUACUUUUCUACUA | 323 | 376-396 | UAGUAGAAAAGUACAGGUCACCA | 863 | 374-396 |
| 1425457 | | | | | | |
| AD- | ACUUUUCUACUGGCGGUCAUA | 324 | 385-405 | UAUGACCGCCAGUAGAAAAGUAC | 864 | 383-405 |
| 1425466 | | | | | | |
| AD- | UCUACUGGCGGUCAUCUUCUA | 325 | 390-410 | UAGAAGAUGACCGCCAGUAGAAA | 865 | 388-410 |
| 1425471 | | | | | | |
| AD- | GGUCAUCUUCUGCCUGGGUUA | 326 | 399-419 | UAACCCAGGCAGAAGAUGACCGC | 866 | 397-419 |
| 1425480 | | | | | | |
| AD- | UUCUGCCUGGGUUCCUAUGGA | 327 | 406-426 | UCCAUAGGAACCCAGGCAGAAGA | 867 | 404-426 |
| 1425487 | | | | | | |
| AD- | CCUGGGUUCCUAUGGCAACUA | 328 | 411-431 | UAGUUGCCAUAGGAACCCAGGCA | 868 | 409-431 |
| 1425492 | | | | | | |
| AD- | GUUCCUAUGGCAACUUCAUUA | 329 | 416-436 | UAAUGAAGUUGCCAUAGGAACCC | 869 | 414-436 |
| 1425497 | | | | | | |
| AD- | UAUGGCAACUUCAUUGUCUUA | 330 | 421-441 | UAAGACAAUGAAGUUGCCAUAGG | 870 | 419-441 |
| 1425502 | | | | | | |
| AD- | CAACUUCAUUGUCUUCUUGUA | 331 | 426-446 | UACAAGAAGACAAUGAAGUUGCC | 871 | 424-446 |
| 1425507 | | | | | | |
| AD- | UCAUUGUCUUCUUGUCCUUCA | 332 | 431-451 | UGAAGGACAAGAAGACAAUGAAG | 872 | 429-451 |
| 1425512 | | | | | | |
| AD- | GUCUUCUUGUCCUUCUUCGAA | 333 | 436-456 | UUCGAAGAAGGACAAGAAGACAA | 873 | 434-456 |
| 1425515 | | | | | | |
| AD- | CUUGUCCUUCUUCGAUCCAGA | 334 | 441-461 | UCUGGAUCGAAGAAGGACAAGAA | 874 | 439-461 |
| 1425520 | | | | | | |
| AD- | CCUUCUUCGAUCCAGCCUUCA | 335 | 446-466 | UGAAGGCUGGAUCGAAGAAGGAC | 875 | 444-466 |
| 1425525 | | | | | | |
| AD- | GAUCCAGCCUUCAGGAAAUUA | 336 | 454-474 | UAAUUUCCUGAAGGCUGGAUCGA | 876 | 452-474 |
| 1425533 | | | | | | |
| AD- | AGCCUUCAGGAAAUUCAGAAA | 337 | 459-479 | UUUCUGAAUUUCCUGAAGGCUGG | 877 | 457-479 |
| 1425538 | | | | | | |
| AD- | UCAGGAAAUUCAGAACCAACA | 338 | 464-484 | UGUUGGUUCUGAAUUUCCUGAAG | 878 | 462-484 |
| 1425543 | | | | | | |
| AD- | AUUCAGAACCAACUUUGAUUA | 339 | 471-491 | UAAUCAAAGUUGGUUCUGAAUUU | 879 | 469-491 |
| 1425550 | | | | | | |
| AD- | AACCAACUUUGAUUUCAUGAA | 340 | 477-497 | UUCAUGAAAUCAAAGUUGGUUCU | 880 | 475-497 |
| 1425556 | | | | | | |
| AD- | UUUGAUUUCAUGAUCCUGAAA | 341 | 484-504 | UUUCAGGAUCAUGAAAUCAAAGU | 881 | 482-504 |
| 1425563 | | | | | | |
| AD- | UUCAUGAUCCUGAACCUGUCA | 342 | 490-510 | UGACAGGUUCAGGAUCAUGAAAU | 882 | 488-510 |
| 1425569 | | | | | | |
| AD- | GAUCCUGAACCUGUCCUUCUA | 343 | 495-515 | UAGAAGGACAGGUUCAGGAUCAU | 883 | 493-515 |
| 1425574 | | | | | | |
| AD- | GAACCUGUCCUUCUGUGACCA | 344 | 501-521 | UGGUCACAGAAGGACAGGUUCAG | 884 | 499-521 |
| 1425580 | | | | | | |
| AD- | UGUCCUUCUGUGACCUCUUCA | 345 | 506-526 | UGAAGAGGUCACAGAAGGACAGG | 885 | 504-526 |
| 1425585 | | | | | | |
| AD- | UUCUGUGACCUCUUCAUUUGA | 346 | 511-531 | UCAAAUGAAGAGGUCACAGAAGG | 886 | 509-531 |
| 1425590 | | | | | | |
| AD- | GACCUCUUCAUUUGUGGAGUA | 347 | 517-537 | UACUCCACAAAUGAAGAGGUCAC | 887 | 515-537 |
| 1425596 | | | | | | |
| AD- | CUUCAUUUGUGGAGUGACAGA | 348 | 522-542 | UCUGUCACUCCACAAAUGAAGAG | 888 | 520-542 |
| 1425601 | | | | | | |
| AD- | CAUGUUCACCUUUGUGUUAUA | 349 | 546-566 | UAUAACACAAAGGUGAACAUGGG | 889 | 544-566 |
| 1425604 | | | | | | |
| AD- | UCACCUUUGUGUUAUUCUUCA | 350 | 551-571 | UGAAGAAUAACACAAAGGUGAAC | 890 | 549-571 |
| 1425609 | | | | | | |
| AD- | UUUGUGUUAUUCUUCAGCUCA | 351 | 556-576 | UGAGCUGAAGAAUAACACAAAGG | 891 | 554-576 |
| 1425614 | | | | | | |
| AD- | GUUAUUCUUCAGCUCAGCCAA | 352 | 561-581 | UUGGCUGAGCUGAAGAAUAACAC | 892 | 559-581 |
| 1425619 | | | | | | |
| AD- | CAGCUCAGCCAGUAGUAUCCA | 353 | 570-590 | UGGAUACUACUGGCUGAGCUGAA | 893 | 568-590 |
| 1425628 | | | | | | |
| AD- | CAGCCAGUAGUAUCCCGGAUA | 354 | 575-595 | UAUCCGGGAUACUACUGGCUGAG | 894 | 573-595 |
| 1425633 | | | | | | |
| AD- | UAGUAUCCCGGAUGCUUUCUA | 355 | 582-602 | UAGAAAGCAUCCGGGAUACUACU | 895 | 580-602 |
| 1425640 | | | | | | |
| AD- | UCCCGGAUGCUUUCUGCUUCA | 356 | 587-607 | UGAAGCAGAAAGCAUCCGGGAUA | 896 | 585-607 |
| 1425645 | | | | | | |
| AD- | GAUGCUUUCUGCUUCACUUUA | 357 | 592-612 | UAAAGUGAAGCAGAAAGCAUCCG | 897 | 590-612 |
| 1425650 | | | | | | |
| AD- | UUUCUGCUUCACUUUCCAUCA | 358 | 597-617 | UGAUGGAAAGUGAAGCAGAAAGC | 898 | 595-617 |
| 1425655 | | | | | | |
| AD- | CACUUUCCAUCUCACCAGUUA | 359 | 606-626 | UAACUGGUGAGAUGGAAAGUGAA | 899 | 604-626 |
| 1425664 | | | | | | |
| AD- | CCAUCUCACCAGUUCAGGCUA | 360 | 612-632 | UAGCCUGAACUGGUGAGAUGGAA | 900 | 610-632 |
| 1425670 | | | | | | |
| AD- | UCACCAGUUCAGGCUUCAUCA | 361 | 617-637 | UGAUGAAGCCUGAACUGGUGAGA | 901 | 615-637 |
| 1425675 | | | | | | |
| AD- | AGUUCAGGCUUCAUCAUCAUA | 362 | 622-642 | UAUGAUGAUGAAGCCUGAACUGG | 902 | 620-642 |
| 1425680 | | | | | | |
| AD- | AGGCUUCAUCAUCAUGUCUCA | 363 | 627-647 | UGAGACAUGAUGAUGAAGCCUGA | 903 | 625-647 |
| 1425685 | | | | | | |
| AD- | UCAUCAUCAUGUCUCUGAAGA | 364 | 632-652 | UCUUCAGAGACAUGAUGAUGAAG | 904 | 630-652 |
| 1425690 | | | | | | |
| AD- | AUCAUGUCUCUGAAGACAGUA | 365 | 637-657 | UACUGUCUUCAGAGACAUGAUGA | 905 | 635-657 |
| 1425695 | | | | | | |
| AD- | UCUCUGAAGACAGUGGCAGUA | 366 | 643-663 | UACUGCCACUGUCUUCAGAGACA | 906 | 641-663 |
| 1425701 | | | | | | |
| AD- | AGUGGCAGUGAUCGCCCUGCA | 367 | 654-674 | UGCAGGGCGAUCACUGCCACUGU | 907 | 652-674 |
| 1425712 | | | | | | |
| AD- | CACCGGCUCCGGAUGGUGUUA | 368 | 673-693 | UAACACCAUCCGGAGCCGGUGCA | 908 | 671-693 |
| 1425727 | | | | | | |
| AD- | ACAGCCUAAUCGCACGGCCUA | 369 | 699-719 | UAGGCCGUGCGAUUAGGCUGUUU | 909 | 697-719 |
| 1425735 | | | | | | |
| AD- | CUAAUCGCACGGCCUCCUUUA | 370 | 704-724 | UAAAGGAGGCCGUGCGAUUAGGC | 910 | 702-724 |
| 1425740 | | | | | | |
| AD- | CGCACGGCCUCCUUUCCCUGA | 371 | 709-729 | UCAGGGAAAGGAGGCCGUGCGAU | 911 | 707-729 |
| 1425745 | | | | | | |
| AD- | CCUCCUUUCCCUGCACCGUAA | 372 | 716-736 | UUACGGUGCAGGGAAAGGAGGCC | 912 | 714-736 |
| 1425752 | | | | | | |
| AD- | UUUCCCUGCACCGUACUCCUA | 373 | 721-741 | UAGGAGUACGGUGCAGGGAAAGG | 913 | 719-741 |
| 1425757 | | | | | | |
| AD- | UGCACCGUACUCCUCACCCUA | 374 | 727-747 | UAGGGUGAGGAGUACGGUGCAGG | 914 | 725-747 |
| 1425763 | | | | | | |
| AD- | ACUCCUCACCCUGCUUCUCUA | 375 | 735-755 | UAGAGAAGCAGGGUGAGGAGUAC | 915 | 733-755 |
| 1425771 | | | | | | |
| AD- | ACCCUGCUUCUCUGGGCCACA | 376 | 742-762 | UGUGGCCCAGAGAAGCAGGGUGA | 916 | 740-762 |
| 1425778 | | | | | | |
| AD- | CUUCUCUGGGCCACCAGUUUA | 377 | 748-768 | UAAACUGGUGGCCCAGAGAAGCA | 917 | 746-768 |
| 1425784 | | | | | | |
| AD- | CUGGGCCACCAGUUUCACCCA | 378 | 753-773 | UGGGUGAAACUGGUGGCCCAGAG | 918 | 751-773 |
| 1425789 | | | | | | |
| AD- | CACCAGUUUCACCCUUGCCAA | 379 | 759-779 | UUGGCAAGGGUGAAACUGGUGGC | 919 | 757-779 |
| 1425795 | | | | | | |
| AD- | UCACCCUUGCCACCUUGGCUA | 380 | 767-787 | UAGCCAAGGUGGCAAGGGUGAAA | 920 | 765-787 |
| 1425803 | | | | | | |
| AD- | GCCACCUUGGCUACCUUGAAA | 381 | 775-795 | UUUCAAGGUAGCCAAGGUGGCAA | 921 | 773-795 |
| 1425811 | | | | | | |
| AD- | CUUGGCUACCUUGAAAACCAA | 382 | 780-800 | UUGGUUUUCAAGGUAGCCAAGGU | 922 | 778-800 |
| 1425816 | | | | | | |
| AD- | UACCUUGAAAACCAGCAAGUA | 383 | 786-806 | UACUUGCUGGUUUUCAAGGUAGC | 923 | 784-806 |
| 1425822 | | | | | | |
| AD- | AACCAGCAAGUCCCACCUCUA | 384 | 795-815 | UAGAGGUGGGACUUGCUGGUUUU | 924 | 793-815 |
| 1425831 | | | | | | |
| AD- | AAGUCCCACCUCUGUCUUCCA | 385 | 802-822 | UGGAAGACAGAGGUGGGACUUGC | 925 | 800-822 |
| 1425838 | | | | | | |
| AD- | CACCUCUGUCUUCCCAUGUCA | 386 | 808-828 | UGACAUGGGAAGACAGAGGUGGG | 926 | 806-828 |
| 1425844 | | | | | | |
| AD- | CUGUCUUCCCAUGUCCAGUCA | 387 | 813-833 | UGACUGGACAUGGGAAGACAGAG | 927 | 811-833 |
| 1425849 | | | | | | |
| AD- | UUCCCAUGUCCAGUCUGAUUA | 388 | 818-838 | UAAUCAGACUGGACAUGGGAAGA | 928 | 816-838 |
| 1425854 | | | | | | |
| AD- | CCAGUCUGAUUGCUGGAAAAA | 389 | 827-847 | UUUUUCCAGCAAUCAGACUGGAC | 929 | 825-847 |
| 1425863 | | | | | | |
| AD- | UGAUUGCUGGAAAAGGGAAAA | 390 | 833-853 | UUUUCCCUUUUCCAGCAAUCAGA | 930 | 831-853 |
| 1425869 | | | | | | |
| AD- | CUGGAAAAGGGAAAGCCAUUA | 391 | 839-859 | UAAUGGCUUUCCCUUUUCCAGCA | 931 | 837-859 |
| 1425875 | | | | | | |
| AD- | AAGGGAAAGCCAUUUUGUCUA | 392 | 845-865 | UAGACAAAAUGGCUUUCCCUUUU | 932 | 843-865 |
| 1425881 | | | | | | |
| AD- | AGCCAUUUUGUCUCUCUAUGA | 393 | 852-872 | UCAUAGAGAGACAAAAUGGCUUU | 933 | 850-872 |
| 1425888 | | | | | | |
| AD- | UUUUGUCUCUCUAUGUGGUCA | 394 | 857-877 | UGACCACAUAGAGAGACAAAAUG | 934 | 855-877 |
| 1425893 | | | | | | |
| AD- | UCUCUCUAUGUGGUCGACUUA | 395 | 862-882 | UAAGUCGACCACAUAGAGAGACA | 935 | 860-882 |
| 1425898 | | | | | | |
| AD- | UGUGGUCGACUUCACCUUCUA | 396 | 870-890 | UAGAAGGUGAAGUCGACCACAUA | 936 | 868-890 |
| 1425906 | | | | | | |
| AD- | CGACUUCACCUUCUGUGUUGA | 397 | 876-896 | UCAACACAGAAGGUGAAGUCGAC | 937 | 874-896 |
| 1425912 | | | | | | |
| AD- | ACCUUCUGUGUUGCUGUGGUA | 398 | 883-903 | UACCACAGCAACACAGAAGGUGA | 938 | 881-903 |
| 1425919 | | | | | | |
| AD- | UGUUGCUGUGGUCUCUGUCUA | 399 | 891-911 | UAGACAGAGACCACAGCAACACA | 939 | 889-911 |
| 1425927 | | | | | | |
| AD- | UGUGGUCUCUGUCUCUUACAA | 400 | 897-917 | UUGUAAGAGACAGAGACCACAGC | 940 | 895-917 |
| 1425933 | | | | | | |
| AD- | UCUCUGUCUCUUACAUCAUGA | 401 | 902-922 | UCAUGAUGUAAGAGACAGAGACC | 941 | 900-922 |
| 1425938 | | | | | | |
| AD- | UCUUACAUCAUGAUUGCUCAA | 402 | 910-930 | UUGAGCAAUCAUGAUGUAAGAGA | 942 | 908-930 |
| 1425946 | | | | | | |
| AD- | AUCAUGAUUGCUCAGACCCUA | 403 | 916-936 | UAGGGUCUGAGCAAUCAUGAUGU | 943 | 914-936 |
| 1425952 | | | | | | |
| AD- | AGACCCUGCGGAAGAACGCUA | 404 | 929-949 | UAGCGUUCUUCCGCAGGGUCUGA | 944 | 927-949 |
| 1425965 | | | | | | |
| AD- | UGCGGAAGAACGCUCAAGUCA | 405 | 935-955 | UGACUUGAGCGUUCUUCCGCAGG | 945 | 933-955 |
| 1425971 | | | | | | |
| AD- | AAGAACGCUCAAGUCAGAAAA | 406 | 940-960 | UUUUCUGACUUGAGCGUUCUUCC | 946 | 938-960 |
| 1425976 | | | | | | |
| AD- | CGCUCAAGUCAGAAAGUGCCA | 407 | 945-965 | UGGCACUUUCUGACUUGAGCGUU | 947 | 943-965 |
| 1425981 | | | | | | |
| AD- | GUAAUCACAGUCGAUGCUUCA | 408 | 970-990 | UGAAGCAUCGACUGUGAUUACAG | 948 | 968-990 |
| 1425984 | | | | | | |
| AD- | AGUCGAUGCUUCCAGACCACA | 409 | 978-998 | UGUGGUCUGGAAGCAUCGACUGU | 949 | 976-998 |
| 1425992 | | | | | | |
| AD- | GCUUCCAGACCACAGCCUUUA | 410 | 985-1005 | UAAAGGCUGUGGUCUGGAAGCAU | 950 | 983-1005 |
| 1425999 | | | | | | |
| AD- | CAGACCACAGCCUUUCAUGGA | 411 | 990-1010 | UCCAUGAAAGGCUGUGGUCUGGA | 951 | 988-1010 |
| 1426004 | | | | | | |
| AD- | GUGGAGAUCCCAUCCAGUGUA | 412 | 1028-1048 | UACACUGGAUGGGAUCUCCACCU | 952 | 1026-1048 |
| 1426023 | | | | | | |
| AD- | GAUCCCAUCCAGUGUGCCAUA | 413 | 1033-1053 | UAUGGCACACUGGAUGGGAUCUC | 953 | 1031-1053 |
| 1426028 | | | | | | |
| AD- | UGCCGGCUCUGUAUAGGAACA | 414 | 1052-1072 | UGUUCCUAUACAGAGCCGGCAUG | 954 | 1050-1072 |
| 1426047 | | | | | | |
| AD- | GCUCUGUAUAGGAACCAGAAA | 415 | 1057-1077 | UUUCUGGUUCCUAUACAGAGCCG | 955 | 1055-1077 |
| 1426052 | | | | | | |
| AD- | GUAUAGGAACCAGAAUUACAA | 416 | 1062-1082 | UUGUAAUUCUGGUUCCUAUACAG | 956 | 1060-1082 |
| 1426057 | | | | | | |
| AD- | GAACCAGAAUUACAACAAACA | 417 | 1068-1088 | UGUUUGUUGUAAUUCUGGUUCCU | 957 | 1066-1088 |
| 1426063 | | | | | | |
| AD- | AAUUACAACAAACUGCAGCAA | 418 | 1075-1095 | UUGCUGCAGUUUGUUGUAAUUCU | 958 | 1073-1095 |
| 1426070 | | | | | | |
| AD- | AACAAACUGCAGCACGUUCAA | 419 | 1081-1101 | UUGAACGUGCUGCAGUUUGUUGU | 959 | 1079-1101 |
| 1426076 | | | | | | |
| AD- | CUGCAGCACGUUCAGACCCGA | 420 | 1087-1107 | UCGGGUCUGAACGUGCUGCAGUU | 960 | 1085-1107 |
| 1426082 | | | | | | |
| AD- | CACGUUCAGACCCGUGGAUAA | 421 | 1093-1113 | UUAUCCACGGGUCUGAACGUGCU | 961 | 1091-1113 |
| 1426088 | | | | | | |
| AD- | CAGACCCGUGGAUAUACCAAA | 422 | 1099-1119 | UUUGGUAUAUCCACGGGUCUGAA | 962 | 1097-1119 |
| 1426094 | | | | | | |
| AD- | CCGUGGAUAUACCAAGAGUCA | 423 | 1104-1124 | UGACUCUUGGUAUAUCCACGGGU | 963 | 1102-1124 |
| 1426099 | | | | | | |
| AD- | GAUAUACCAAGAGUCCCAACA | 424 | 1109-1129 | UGUUGGGACUCUUGGUAUAUCCA | 964 | 1107-1129 |
| 1426104 | | | | | | |
| AD- | ACCAAGAGUCCCAACCAACUA | 425 | 1114-1134 | UAGUUGGUUGGGACUCUUGGUAU | 965 | 1112-1134 |
| 1426109 | | | | | | |
| AD- | AGUCCCAACCAACUGGUCACA | 426 | 1120-1140 | UGUGACCAGUUGGUUGGGACUCU | 966 | 1118-1140 |
| 1426115 | | | | | | |
| AD- | GCAAGCCGACUCCAGCUCGUA | 427 | 1147-1167 | UACGAGCUGGAGUCGGCUUGCUG | 967 | 1145-1167 |
| 1426122 | | | | | | |
| AD- | CGACUCCAGCUCGUAUCAGCA | 428 | 1153-1173 | UGCUGAUACGAGCUGGAGUCGGC | 968 | 1151-1173 |
| 1426128 | | | | | | |
| AD- | CUCGUAUCAGCCAUCAACCUA | 429 | 1162-1182 | UAGGUUGAUGGCUGAUACGAGCU | 969 | 1160-1182 |
| 1426137 | | | | | | |
| AD- | AGCCAUCAACCUCUCCACUGA | 430 | 1170-1190 | UCAGUGGAGAGGUUGAUGGCUGA | 970 | 1168-1190 |
| 1426145 | | | | | | |
| AD- | UCAACCUCUCCACUGCCAAGA | 431 | 1175-1195 | UCUUGGCAGUGGAGAGGUUGAUG | 971 | 1173-1195 |
| 1426150 | | | | | | |
| AD- | CUCUCCACUGCCAAGGAUUCA | 432 | 1180-1200 | UGAAUCCUUGGCAGUGGAGAGGU | 972 | 1178-1200 |
| 1426155 | | | | | | |
| AD- | UGCCAAGGAUUCCAAAGCCGA | 433 | 1188-1208 | UCGGCUUUGGAAUCCUUGGCAGU | 973 | 1186-1208 |
| 1426163 | | | | | | |
| AD- | GAUUCCAAAGCCGUGGUCACA | 434 | 1195-1215 | UGUGACCACGGCUUUGGAAUCCU | 974 | 1193-1215 |
| 1426170 | | | | | | |
| AD- | AAAGCCGUGGUCACCUGUGUA | 435 | 1201-1221 | UACACAGGUGACCACGGCUUUGG | 975 | 1199-1221 |
| 1426176 | | | | | | |
| AD- | UGGUCACCUGUGUGAUCAUUA | 436 | 1208-1228 | UAAUGAUCACACAGGUGACCACG | 976 | 1206-1228 |
| 1426183 | | | | | | |
| AD- | ACCUGUGUGAUCAUUGUGCUA | 437 | 1213-1233 | UAGCACAAUGAUCACACAGGUGA | 977 | 1211-1233 |
| 1426188 | | | | | | |
| AD- | GUGAUCAUUGUGCUGUCAGUA | 438 | 1219-1239 | UACUGACAGCACAAUGAUCACAC | 978 | 1217-1239 |
| 1426194 | | | | | | |
| AD- | GUGCUGUCAGUCCUGGUGUGA | 439 | 1228-1248 | UCACACCAGGACUGACAGCACAA | 979 | 1226-1248 |
| 1426203 | | | | | | |
| AD- | UCAGUCCUGGUGUGCUGUCUA | 440 | 1234-1254 | UAGACAGCACACCAGGACUGACA | 980 | 1232-1254 |
| 1426209 | | | | | | |
| AD- | CUGGUGUGCUGUCUUCCACUA | 441 | 1240-1260 | UAGUGGAAGACAGCACACCAGGA | 981 | 1238-1260 |
| 1426215 | | | | | | |
| AD- | UUUCCUUGGUACAGGUGGUUA | 442 | 1265-1285 | UAACCACCUGUACCAAGGAAAUC | 982 | 1263-1285 |
| 1426222 | | | | | | |
| AD- | UUGGUACAGGUGGUUCUCUCA | 443 | 1270-1290 | UGAGAGAACCACCUGUACCAAGG | 983 | 1268-1290 |
| 1426227 | | | | | | |
| AD- | GUGGUUCUCUCCAGCAAUGGA | 444 | 1279-1299 | UCCAUUGCUGGAGAGAACCACCU | 984 | 1277-1299 |
| 1426236 | | | | | | |
| AD- | UCUCCAGCAAUGGGAGCUUCA | 445 | 1286-1306 | UGAAGCUCCCAUUGCUGGAGAGA | 985 | 1284-1306 |
| 1426243 | | | | | | |
| AD- | AAUGGGAGCUUCAUUCUUUAA | 446 | 1294-1314 | UUAAAGAAUGAAGCUCCCAUUGC | 986 | 1292-1314 |
| 1426251 | | | | | | |
| AD- | UUCAUUCUUUACCAGUUUGAA | 447 | 1303-1323 | UUCAAACUGGUAAAGAAUGAAGC | 987 | 1301-1323 |
| 1426260 | | | | | | |
| AD- | CUUUACCAGUUUGAAUUGUUA | 448 | 1309-1329 | UAACAAUUCAAACUGGUAAAGAA | 988 | 1307-1329 |
| 1426266 | | | | | | |
| AD- | CAGUUUGAAUUGUUUGGAUUA | 449 | 1315-1335 | UAAUCCAAACAAUUCAAACUGGU | 989 | 1313-1335 |
| 1426272 | | | | | | |
| AD- | AAUUGUUUGGAUUUACUCUUA | 450 | 1322-1342 | UAAGAGUAAAUCCAAACAAUUCA | 990 | 1320-1342 |
| 1426278 | | | | | | |
| AD- | UCUUAUAUUUUUCAAGUCAGA | 451 | 1338-1358 | UCUGACUUGAAAAAUAUAAGAGU | 991 | 1336-1358 |
| 1426289 | | | | | | |
| AD- | UUUCAAGUCAGGAUUAAACCA | 452 | 1347-1367 | UGGUUUAAUCCUGACUUGAAAAA | 992 | 1345-1367 |
| 1426298 | | | | | | |
| AD- | GUCAGGAUUAAACCCUUUUAA | 453 | 1353-1373 | UUAAAAGGGUUUAAUCCUGACUU | 993 | 1351-1373 |
| 1426304 | | | | | | |
| AD- | AACCCUUUUAUAUAUUCUCGA | 454 | 1363-1383 | UCGAGAAUAUAUAAAAGGGUUUA | 994 | 1361-1383 |
| 1426311 | | | | | | |
| AD- | UUUUAUAUAUUCUCGGAACAA | 455 | 1368-1388 | UUGUUCCGAGAAUAUAUAAAAGG | 995 | 1366-1388 |
| 1426316 | | | | | | |
| AD- | UAUAUUCUCGGAACAGUGCAA | 456 | 1373-1393 | UUGCACUGUUCCGAGAAUAUAUA | 996 | 1371-1393 |
| 1426321 | | | | | | |
| AD- | UCUCGGAACAGUGCAGGGCUA | 457 | 1378-1398 | UAGCCCUGCACUGUUCCGAGAAU | 997 | 1376-1398 |
| 1426326 | | | | | | |
| AD- | GCAGGGCUGAGAAGGAAAGUA | 458 | 1390-1410 | UACUUUCCUUCUCAGCCCUGCAC | 998 | 1388-1410 |
| 1426338 | | | | | | |
| AD- | GCUGAGAAGGAAAGUGCUCUA | 459 | 1395-1415 | UAGAGCACUUUCCUUCUCAGCCC | 999 | 1393-1415 |
| 1426343 | | | | | | |
| AD- | GAAGGAAAGUGCUCUGGUGCA | 460 | 1400-1420 | UGCACCAGAGCACUUUCCUUCUC | 1000 | 1398-1420 |
| 1426348 | | | | | | |
| AD- | CUGGUGCCUCCAAUACAUAGA | 461 | 1413-1433 | UCUAUGUAUUGGAGGCACCAGAG | 1001 | 1411-1433 |
| 1426361 | | | | | | |
| AD- | CCUCCAAUACAUAGGCCUGGA | 462 | 1419-1439 | UCCAGGCCUAUGUAUUGGAGGCA | 1002 | 1417-1439 |
| 1426367 | | | | | | |
| AD- | AAUACAUAGGCCUGGGUUUUA | 463 | 1424-1444 | UAAAACCCAGGCCUAUGUAUUGG | 1003 | 1422-1444 |
| 1426372 | | | | | | |
| AD- | UUUCUGCUGCAAACAAAAGAA | 464 | 1443-1463 | UUCUUUUGUUUGCAGCAGAAAAA | 1004 | 1441-1463 |
| 1426373 | | | | | | |
| AD- | UGCAAACAAAAGACUCGACUA | 465 | 1450-1470 | UAGUCGAGUCUUUUGUUUGCAGC | 1005 | 1448-1470 |
| 1426380 | | | | | | |
| AD- | ACAAAAGACUCGACUUCGAGA | 466 | 1455-1475 | UCUCGAAGUCGAGUCUUUUGUUU | 1006 | 1453-1475 |
| 1426385 | | | | | | |
| AD- | AGACUCGACUUCGAGCCAUGA | 467 | 1460-1480 | UCAUGGCUCGAAGUCGAGUCUUU | 1007 | 1458-1480 |
| 1426390 | | | | | | |
| AD- | GACUUCGAGCCAUGGGAAAAA | 468 | 1466-1486 | UUUUUCCCAUGGCUCGAAGUCGA | 1008 | 1464-1486 |
| 1426396 | | | | | | |
| AD- | CGAGCCAUGGGAAAAGGGAAA | 469 | 1471-1491 | UUUCCCUUUUCCCAUGGCUCGAA | 1009 | 1469-1491 |
| 1426401 | | | | | | |
| AD- | CAUGGGAAAAGGGAACCUCGA | 470 | 1476-1496 | UCGAGGUUCCCUUUUCCCAUGGC | 1010 | 1474-1496 |
| 1426406 | | | | | | |
| AD- | AAAGGGAACCUCGAAGUCAAA | 471 | 1483-1503 | UUUGACUUCGAGGUUCCCUUUUC | 1011 | 1481-1503 |
| 1426413 | | | | | | |
| AD- | AACCUCGAAGUCAACAGAAAA | 472 | 1489-1509 | UUUUCUGUUGACUUCGAGGUUCC | 1012 | 1487-1509 |
| 1426419 | | | | | | |
| AD- | GAAGUCAACAGAAACAAAUCA | 473 | 1495-1515 | UGAUUUGUUUCUGUUGACUUCGA | 1013 | 1493-1515 |
| 1426425 | | | | | | |
| AD- | CAACAGAAACAAAUCCUCCCA | 474 | 1500-1520 | UGGGAGGAUUUGUUUCUGUUGAC | 1014 | 1498-1520 |
| 1426430 | | | | | | |
| AD- | AAACAAAUCCUCCCAUCAUGA | 475 | 1506-1526 | UCAUGAUGGGAGGAUUUGUUUCU | 1015 | 1504-1526 |
| 1426436 | | | | | | |
| AD- | AUCCUCCCAUCAUGAAACAAA | 476 | 1512-1532 | UUUGUUUCAUGAUGGGAGGAUUU | 1016 | 1510-1532 |
| 1426442 | | | | | | |
| AD- | CCCAUCAUGAAACAAACUCUA | 477 | 1517-1537 | UAGAGUUUGUUUCAUGAUGGGAG | 1017 | 1515-1537 |
| 1426447 | | | | | | |
| AD- | AUGAAACAAACUCUGCCUACA | 478 | 1523-1543 | UGUAGGCAGAGUUUGUUUCAUGA | 1018 | 1521-1543 |
| 1426453 | | | | | | |
| AD- | ACUCUGCCUACAUGUUAUCUA | 479 | 1532-1552 | UAGAUAACAUGUAGGCAGAGUUU | 1019 | 1530-1552 |
| 1426462 | | | | | | |
| AD- | GCCUACAUGUUAUCUCCAAAA | 480 | 1537-1557 | UUUUGGAGAUAACAUGUAGGCAG | 1020 | 1535-1557 |
| 1426467 | | | | | | |
| AD- | CAUGUUAUCUCCAAAGCCACA | 481 | 1542-1562 | UGUGGCUUUGGAGAUAACAUGUA | 1021 | 1540-1562 |
| 1426472 | | | | | | |
| AD- | UCCAAAGCCACAGAAGAAAUA | 482 | 1551-1571 | UAUUUCUUCUGUGGCUUUGGAGA | 1022 | 1549-1571 |
| 1426481 | | | | | | |
| AD- | AGCCACAGAAGAAAUUUGUGA | 483 | 1556-1576 | UCACAAAUUUCUUCUGUGGCUUU | 1023 | 1554-1576 |
| 1426486 | | | | | | |
| AD- | CAGAAGAAAUUUGUGGACCAA | 484 | 1561-1581 | UUGGUCCACAAAUUUCUUCUGUG | 1024 | 1559-1581 |
| 1426491 | | | | | | |
| AD- | GAAAUUUGUGGACCAGGCUUA | 485 | 1566-1586 | UAAGCCUGGUCCACAAAUUUCUU | 1025 | 1564-1586 |
| 1426496 | | | | | | |
| AD- | ACCAGGCUUGUGGCCCAAGUA | 486 | 1577-1597 | UACUUGGGCCACAAGCCUGGUCC | 1026 | 1575-1597 |
| 1426507 | | | | | | |
| AD- | UGUGGCCCAAGUCAUUCAAAA | 487 | 1585-1605 | UUUUGAAUGACUUGGGCCACAAG | 1027 | 1583-1605 |
| 1426515 | | | | | | |
| AD- | CCCAAGUCAUUCAAAAGAAAA | 488 | 1590-1610 | UUUUCUUUUGAAUGACUUGGGCC | 1028 | 1588-1610 |
| 1426520 | | | | | | |
| AD- | CAUUCAAAAGAAAGUAUGGUA | 489 | 1597-1617 | UACCAUACUUUCUUUUGAAUGAC | 1029 | 1595-1617 |
| 1426527 | | | | | | |
| AD- | AAAAGAAAGUAUGGUGAGUCA | 490 | 1602-1622 | UGACUCACCAUACUUUCUUUUGA | 1030 | 1600-1622 |
| 1426532 | | | | | | |
| AD- | AGUAUGGUGAGUCCCAAGAUA | 491 | 1609-1629 | UAUCUUGGGACUCACCAUACUUU | 1031 | 1607-1629 |
| 1426539 | | | | | | |
| AD- | UGAGUCCCAAGAUCUCUGCUA | 492 | 1616-1636 | UAGCAGAGAUCUUGGGACUCACC | 1032 | 1614-1636 |
| 1426546 | | | | | | |
| AD- | CCCAAGAUCUCUGCUGGACAA | 493 | 1621-1641 | UUGUCCAGCAGAGAUCUUGGGAC | 1033 | 1619-1641 |
| 1426551 | | | | | | |
| AD- | GAUCUCUGCUGGACAUCAACA | 494 | 1626-1646 | UGUUGAUGUCCAGCAGAGAUCUU | 1034 | 1624-1646 |
| 1426556 | | | | | | |
| AD- | CUGCUGGACAUCAACACUGUA | 495 | 1631-1651 | UACAGUGUUGAUGUCCAGCAGAG | 1035 | 1629-1651 |
| 1426561 | | | | | | |
| AD- | GACAUCAACACUGUGGUCAGA | 496 | 1637-1657 | UCUGACCACAGUGUUGAUGUCCA | 1036 | 1635-1657 |
| 1426567 | | | | | | |
| AD- | ACACUGUGGUCAGAGCAGCUA | 497 | 1644-1664 | UAGCUGCUCUGACCACAGUGUUG | 1037 | 1642-1664 |
| 1426574 | | | | | | |
| AD- | CAACACUCGGAUUGAACCUUA | 498 | 1674-1694 | UAAGGUUCAAUCCGAGUGUUGAU | 1038 | 1672-1694 |
| 1426583 | | | | | | |
| AD- | CUCGGAUUGAACCUUACUACA | 499 | 1679-1699 | UGUAGUAAGGUUCAAUCCGAGUG | 1039 | 1677-1699 |
| 1426588 | | | | | | |
| AD- | UUGAACCUUACUACAGCAUCA | 500 | 1685-1705 | UGAUGCUGUAGUAAGGUUCAAUC | 1040 | 1683-1705 |
| 1426594 | | | | | | |
| AD- | CCUUACUACAGCAUCUAUAAA | 501 | 1690-1710 | UUUAUAGAUGCUGUAGUAAGGUU | 1041 | 1688-1710 |
| 1426599 | | | | | | |
| AD- | CUACAGCAUCUAUAACAGCAA | 502 | 1695-1715 | UUGCUGUUAUAGAUGCUGUAGUA | 1042 | 1693-1715 |
| 1426604 | | | | | | |
| AD- | CAUCUAUAACAGCAGCCCUUA | 503 | 1701-1721 | UAAGGGCUGCUGUUAUAGAUGCU | 1043 | 1699-1721 |
| 1426610 | | | | | | |
| AD- | GAGAGCAGCCCAUGUAACUUA | 504 | 1729-1749 | UAAGUUACAUGGGCUGCUCUCCU | 1044 | 1727-1749 |
| 1426638 | | | | | | |
| AD- | CAGCCCAUGUAACUUACAGCA | 505 | 1734-1754 | UGCUGUAAGUUACAUGGGCUGCU | 1045 | 1732-1754 |
| 1426643 | | | | | | |
| AD- | AUGUAACUUACAGCCAGUAAA | 506 | 1740-1760 | UUUACUGGCUGUAAGUUACAUGG | 1046 | 1738-1760 |
| 1426649 | | | | | | |
| AD- | CUUACAGCCAGUAAACUCUUA | 507 | 1746-1766 | UAAGAGUUUACUGGCUGUAAGUU | 1047 | 1744-1766 |
| 1426655 | | | | | | |
| AD- | CCAGUAAACUCUUUUGGAUUA | 508 | 1753-1773 | UAAUCCAAAAGAGUUUACUGGCU | 1048 | 1751-1773 |
| 1426662 | | | | | | |
| AD- | ACUCUUUUGGAUUUGCCAAUA | 509 | 1760-1780 | UAUUGGCAAAUCCAAAAGAGUUU | 1049 | 1758-1780 |
| 1426669 | | | | | | |
| AD- | GAUUUGCCAAUUCAUAUAUUA | 510 | 1769-1789 | UAAUAUAUGAAUUGGCAAAUCCA | 1050 | 1767-1789 |
| 1426678 | | | | | | |
| AD- | AUUCAUAUAUUGCCAUGCAUA | 511 | 1778-1798 | UAUGCAUGGCAAUAUAUGAAUUG | 1051 | 1776-1798 |
| 1426687 | | | | | | |
| AD- | AUAUUGCCAUGCAUUAUCACA | 512 | 1784-1804 | UGUGAUAAUGCAUGGCAAUAUAU | 1052 | 1782-1804 |
| 1426693 | | | | | | |
| AD- | AUGCAUUAUCACACCACUAAA | 513 | 1792-1812 | UUUAGUGGUGUGAUAAUGCAUGG | 1053 | 1790-1812 |
| 1426701 | | | | | | |
| AD- | UAUCACACCACUAAUGACUUA | 514 | 1798-1818 | UAAGUCAUUAGUGGUGUGAUAAU | 1054 | 1796-1818 |
| 1426707 | | | | | | |
| AD- | CACCACUAAUGACUUAGUGCA | 515 | 1803-1823 | UGCACUAAGUCAUUAGUGGUGUG | 1055 | 1801-1823 |
| 1426712 | | | | | | |
| AD- | AAUGACUUAGUGCAGGAAUAA | 516 | 1810-1830 | UUAUUCCUGCACUAAGUCAUUAG | 1056 | 1808-1830 |
| 1426719 | | | | | | |
| AD- | UUAGUGCAGGAAUAUGACAGA | 517 | 1816-1836 | UCUGUCAUAUUCCUGCACUAAGU | 1057 | 1814-1836 |
| 1426725 | | | | | | |
| AD- | GCAGGAAUAUGACAGCACUUA | 518 | 1821-1841 | UAAGUGCUGUCAUAUUCCUGCAC | 1058 | 1819-1841 |
| 1426730 | | | | | | |
| AD- | UAUGACAGCACUUCAGCCAAA | 519 | 1828-1848 | UUUGGCUGAAGUGCUGUCAUAUU | 1059 | 1826-1848 |
| 1426737 | | | | | | |
| AD- | CACUUCAGCCAAGCAGAUUCA | 520 | 1836-1856 | UGAAUCUGCUUGGCUGAAGUGCU | 1060 | 1834-1856 |
| 1426745 | | | | | | |
| AD- | CAGCCAAGCAGAUUCCAGUCA | 521 | 1841-1861 | UGACUGGAAUCUGCUUGGCUGAA | 1061 | 1839-1861 |
| 1426750 | | | | | | |
| AD- | CUCCGUUUAAAGUCAUGGAGA | 522 | 1863-1883 | UCUCCAUGACUUUAAACGGAGGG | 1062 | 1861-1883 |
| 1426752 | | | | | | |
| AD- | AAAGUCAUGGAGGCUAUAGGA | 523 | 1871-1891 | UCCUAUAGCCUCCAUGACUUUAA | 1063 | 1869-1891 |
| 1426760 | | | | | | |
| AD- | GGAGGCUAUAGGAUCUUAUGA | 524 | 1879-1899 | UCAUAAGAUCCUAUAGCCUCCAU | 1064 | 1877-1899 |
| 1426768 | | | | | | |
| AD- | CUAUAGGAUCUUAUGUAAACA | 525 | 1884-1904 | UGUUUACAUAAGAUCCUAUAGCC | 1065 | 1882-1904 |
| 1426773 | | | | | | |
| AD- | GGAUCUUAUGUAAACAGUUUA | 526 | 1889-1909 | UAAACUGUUUACAUAAGAUCCUA | 1066 | 1887-1909 |
| 1426778 | | | | | | |
| AD- | AAACAGUUUUUGUUUCUGAUA | 527 | 1900-1920 | UAUCAGAAACAAAAACUGUUUAC | 1067 | 1898-1920 |
| 1426789 | | | | | | |
| AD- | GUUUUUGUUUCUGAUAGUAAA | 528 | 1905-1925 | UUUACUAUCAGAAACAAAAACUG | 1068 | 1903-1925 |
| 1426794 | | | | | | |
| AD- | UGUUUCUGAUAGUAAUGGACA | 529 | 1910-1930 | UGUCCAUUACUAUCAGAAACAAA | 1069 | 1908-1930 |
| 1426799 | | | | | | |
| AD- | CUGAUAGUAAUGGACUUUAUA | 530 | 1915-1935 | UAUAAAGUCCAUUACUAUCAGAA | 1070 | 1913-1935 |
| 1426804 | | | | | | |
| AD- | AAUGGACUUUAUUCUAACUUA | 531 | 1923-1943 | UAAGUUAGAAUAAAGUCCAUUAC | 1071 | 1921-1943 |
| 1426812 | | | | | | |
| AD- | UUUAUUCUAACUUGAGAUCAA | 532 | 1930-1950 | UUGAUCUCAAGUUAGAAUAAAGU | 1072 | 1928-1950 |
| 1426819 | | | | | | |
| AD- | UCUAACUUGAGAUCAGUGGCA | 533 | 1935-1955 | UGCCACUGAUCUCAAGUUAGAAU | 1073 | 1933-1955 |
| 1426824 | | | | | | |
| AD- | GAGAUCAGUGGCGGAUCAAAA | 534 | 1943-1963 | UUUUGAUCCGCCACUGAUCUCAA | 1074 | 1941-1963 |
| 1426832 | | | | | | |
| AD- | CAGUGGCGGAUCAAAACCUAA | 535 | 1948-1968 | UUAGGUUUUGAUCCGCCACUGAU | 1075 | 1946-1968 |
| 1426837 | | | | | | |
| AD- | GGAUCAAAACCUACAAGAUUA | 536 | 1955-1975 | UAAUCUUGUAGGUUUUGAUCCGC | 1076 | 1953-1975 |
| 1426844 | | | | | | |
| AD- | AAAACCUACAAGAUUCAACUA | 537 | 1960-1980 | UAGUUGAAUCUUGUAGGUUUUGA | 1077 | 1958-1980 |
| 1426849 | | | | | | |
| AD- | CUACAAGAUUCAACUGAAAAA | 538 | 1965-1985 | UUUUUCAGUUGAAUCUUGUAGGU | 1078 | 1963-1985 |
| 1426854 | | | | | | |
| AD- | AGAUUCAACUGAAAAGUUGGA | 539 | 1970-1990 | UCCAACUUUUCAGUUGAAUCUUG | 1079 | 1968-1990 |
| 1426859 | | | | | | |
| AD- | AACUGAAAAGUUGGCAGUUAA | 540 | 1976-1996 | UUAACUGCCAACUUUUCAGUUGA | 1080 | 1974-1996 |
| 1426865 | | | | | | |
| AD- | AAAGUUGGCAGUUAUGGUUUA | 541 | 1982-2002 | UAAACCAUAACUGCCAACUUUUC | 1081 | 1980-2002 |
| 1426871 | | | | | | |
| AD- | UGGCAGUUAUGGUUUUCUUUA | 542 | 1987-2007 | UAAAGAAAACCAUAACUGCCAAC | 1082 | 1985-2007 |
| 1426876 | | | | | | |
| AD- | GUUAUGGUUUUCUUUCAUCUA | 543 | 1992-2012 | UAGAUGAAAGAAAACCAUAACUG | 1083 | 1990-2012 |
| 1426881 | | | | | | |
| AD- | UUCUUUCAUCUGAUGUGUCAA | 544 | 2001-2021 | UUGACACAUCAGAUGAAAGAAAA | 1084 | 1999-2021 |
| 1426890 | | | | | | |
| AD- | CAUCUGAUGUGUCAGUAUCUA | 545 | 2007-2027 | UAGAUACUGACACAUCAGAUGAA | 1085 | 2005-2027 |
| 1426896 | | | | | | |
| AD- | AUGUGUCAGUAUCUGUUGAUA | 546 | 2013-2033 | UAUCAACAGAUACUGACACAUCA | 1086 | 2011-2033 |
| 1426902 | | | | | | |
| AD- | CAGUAUCUGUUGAUUUGCUUA | 547 | 2019-2039 | UAAGCAAAUCAACAGAUACUGAC | 1087 | 2017-2039 |
| 1426908 | | | | | | |
| AD- | GUUGAUUUGCUUUGUAGUUUA | 548 | 2027-2047 | UAAACUACAAAGCAAAUCAACAG | 1088 | 2025-2047 |
| 1426916 | | | | | | |
| AD- | GCUUUGUAGUUUGUUGACAUA | 549 | 2035-2055 | UAUGUCAACAAACUACAAAGCAA | 1089 | 2033-2055 |
| 1426923 | | | | | | |
| AD- | GUAGUUUGUUGACAUCUUAAA | 550 | 2040-2060 | UUUAAGAUGUCAACAAACUACAA | 1090 | 2038-2060 |
| 1426928 | | | | | | |
| AD- | UUGUUGACAUCUUAAGAUUUA | 551 | 2045-2065 | UAAAUCUUAAGAUGUCAACAAAC | 1091 | 2043-2065 |
| 1426933 | | | | | | |
| AD- | GACAUCUUAAGAUUUGAUGUA | 552 | 2050-2070 | UACAUCAAAUCUUAAGAUGUCAA | 1092 | 2048-2070 |
| 1426938 | | | | | | |
| AD- | UUAAGAUUUGAUGUGAAAGUA | 553 | 2056-2076 | UACUUUCACAUCAAAUCUUAAGA | 1093 | 2054-2076 |
| 1426944 | | | | | | |
| AD- | UUUGAUGUGAAAGUUUUAGAA | 554 | 2062-2082 | UUCUAAAACUUUCACAUCAAAUC | 1094 | 2060-2082 |
| 1426950 | | | | | | |

TABLE 3
Modified Sense and Antisense Strand GPR75 dsRNA Sequences

| Duplex Name | Sense Sequence 5′ to 3′ | SEQ ID NO: | Antisense Sequence 5′ to 3′ | SEQ ID NO: | mRNA target sequence | SEQ ID NO: |
|---|---|---|---|---|---|---|
| AD- | asAfscuaGfaGfGfcaucAfuCfgccauscsg | 1095 | asusggcgAfuGfAfUfgccucuaguuL96 | 1635 | CGAUGGCGAUGAUGCCUCUAGU | 2175 |
| 1423452 | | | | | C | |
| AD- | asAfsugcAfgGfAfcuagAfgGfcaucasusc | 1096 | usgsaugcCfuCfUfAfguccugcauuL96 | 1636 | GAUGAUGCCUCUAGUCCUGCAU | 2176 |
| 1423459 | | | | | C | |
| AD- | asGfsgauGfaUfGfcaggAfcUfagaggscsa | 1097 | cscsucuaGfuCfCfUfgcaucauccuL96 | 1637 | UGCCUCUAGUCCUGCAUCAUCC | 2177 |
| 1423464 | | | | | A | |
| AD- | asCfsgcuCfuGfGfaugaUfgCfaggacsusa | 1098 | gsusccugCfaUfCfAfuccagagcguL96 | 1638 | UAGUCCUGCAUCAUCCAGAGCG | 2178 |
| 1423470 | | | | | G | |
| AD- | asUfsccuCfcAfUfcucgCfaGfuccggsasc | 1099 | cscsggacUfgCfGfAfgauggaggauL96 | 1639 | GUCCGGACUGCGAGAUGGAGGA | 2179 |
| 1423485 | | | | | G | |
| AD- | asAfscagAfuAfAfgccuGfcCfgggugsgsc | 1100 | csascccgGfcAfGfGfcuuaucuguuL96 | 1640 | GCCACCCGGCAGGCUUAUCUGU | 2180 |
| 1423493 | | | | | C | |
| AD- | asCfscaaGfaCfAfgauaAfgCfcugccsgsg | 1101 | gsgscaggCfuUfAfUfcugucuugguL96 | 1641 | CCGGCAGGCUUAUCUGUCUUGG | 2181 |
| 1423498 | | | | | G | |
| AD- | asAfsaaaGfaGfGfcccaAfgAfcagausasa | 1102 | asuscuguCfuUfGfGfgccucuuuuuL96 | 1642 | UUAUCUGUCUUGGGCCUCUUU | 2182 |
| 1423507 | | | | | UG | |
| AD- | asGfsugaCfaAfAfagagGfcCfcaagascsa | 1103 | uscsuuggGfcCfUfCfuuuugucacuL96 | 1643 | UGUCUUGGGCCUCUUUUGUCA | 2183 |
| 1423512 | | | | | CA | |
| AD- | asAfsauaUfgUfGfacaaAfaGfaggccscsa | 1104 | gsgsccucUfuUfUfGfucacauauuuL96 | 1644 | UGGGCCUCUUUUGUCACAUAU | 2184 |
| 1423517 | | | | | UG | |
| AD- | asAfsugaGfcAfAfuaugUfgAfcaaaasgsa | 1105 | ususuuguCfaCfAfUfauugcucauuL96 | 1645 | UCUUUUGUCACAUAUUGCUCA | 2185 |
| 1423523 | | | | | UC | |
| AD- | asUfscacAfgAfUfgagcAfaUfaugugsasc | 1106 | csascauaUfuGfCfUfcaucugugauL96 | 1646 | GUCACAUAUUGCUCAUCUGUGA | 2186 |
| 1423529 | | | | | G | |
| AD- | asUfscagCfuCfAfcagaUfgAfgcaausasu | 1107 | asusugcuCfaUfCfUfgugagcugauL96 | 1647 | AUAUUGCUCAUCUGUGAGCUG | 2187 |
| 1423534 | | | | | AG | |
| AD- | asAfsgggCfcUfCfagcuCfaCfagaugsasg | 1108 | csasucugUfgAfGfCfugaggcccuuL96 | 1648 | CUCAUCUGUGAGCUGAGGCCCU | 2188 |
| 1423540 | | | | | G | |
| AD- | asAfsuacUfcAfGfugagUfcAfgggccsusc | 1109 | gsgscccuGfaCfUfCfacugaguauuL96 | 1649 | GAGGCCCUGACUCACUGAGUAU | 2189 |
| 1423554 | | | | | U | |
| AD- | asCfsaaaAfaUfAfcucaGfuGfagucasgsg | 1110 | usgsacucAfcUfGfAfguauuuuuguL96 | 1650 | CCUGACUCACUGAGUAUUUUU | 2190 |
| 1423559 | | | | | GG | |
| AD- | asAfsaugUfcUfCfcuucUfuCfugcucscsc | 1111 | gsasgcagAfaGfAfAfggagacauuuL96 | 1651 | GGGAGCAGAAGAAGGAGACAUU | 2191 |
| 1423563 | | | | | U | |
| AD- | asAfsgagAfaAfUfgucuCfcUfucuucsusg | 1112 | gsasagaaGfgAfGfAfcauuucucuuL96 | 1652 | CAGAAGAAGGAGACAUUUCUCU | 2192 |
| 1423568 | | | | | C | |
| AD- | asUfsuucGfgAfGfagaaAfuGfucuccsusu | 1113 | gsgsagacAfuUfUfCfucuccgaaauL96 | 1653 | AAGGAGACAUUUCUCUCCGAAA | 2193 |
| 1423574 | | | | | A | |
| AD- | asAfsguuCfaUfUfuucgGfaGfagaaasusg | 1114 | ususucucUfcCfGfAfaaaugaacuuL96 | 1654 | CAUUUCUCUCCGAAAAUGAACU | 2194 |
| 1423581 | | | | | C | |
| AD- | asUfsguuGfaGfUfucauUfuUfcggagsasg | 1115 | csusccgaAfaAfUfGfaacucaacauL96 | 1655 | CUCUCCGAAAAUGAACUCAACA | 2195 |
| 1423586 | | | | | G | |
| AD- | asUfsggcCfuGfUfugagUfuCfauuuuscsg | 1116 | asasaaugAfaCfUfCfaacaggccauL96 | 1656 | CGAAAAUGAACUCAACAGGCCA | 2196 |
| 1423591 | | | | | C | |
| AD- | asGfsaagGfuGfGfccugUfuGfaguucsasu | 1117 | gsasacucAfaCfAfGfgccaccuucuL96 | 1657 | AUGAACUCAACAGGCCACCUUC | 2197 |
| 1423596 | | | | | A | |
| AD- | asGfscauCfcUfGfaaggUfgGfccugususg | 1118 | ascsaggcCfaCfCfUfucaggaugcuL96 | 1658 | CAACAGGCCACCUUCAGGAUGC | 2198 |
| 1423603 | | | | | C | |
| AD- | asAfsggcAfcAfUfggagCfgAfgguggscsa | 1119 | cscsaccuCfgCfUfCfcaugugccuuL96 | 1659 | UGCCACCUCGCUCCAUGUGCCU | 2199 |
| 1423610 | | | | | C | |
| AD- | asGfsaguGfaGfGfcacaUfgGfagcgasgsg | 1120 | uscsgcucCfaUfGfUfgccucacucuL96 | 1660 | CCUCGCUCCAUGUGCCUCACUC | 2200 |
| 1423615 | | | | | A | |
| AD- | asUfsuccUfgUfGfagugAfgGfcacausgsg | 1121 | asusgugcCfuCfAfCfucacaggaauL96 | 1661 | CCAUGUGCCUCACUCACAGGAA | 2201 |
| 1423622 | | | | | G | |
| AD- | asUfsuucCfuUfCfcuguGfaGfugaggscsa | 1122 | cscsucacUfcAfCfAfggaaggaaauL96 | 1662 | UGCCUCACUCACAGGAAGGAAA | 2202 |
| 1423627 | | | | | C | |
| AD- | asAfsgguGfcUfGfuuucCfuUfccugusgsa | 1123 | ascsaggaAfgGfAfAfacagcaccuuL96 | 1663 | UCACAGGAAGGAAACAGCACCU | 2203 |
| 1423635 | | | | | C | |
| AD- | asGfsagaGfaGfGfugcuGfuUfuccuuscsc | 1124 | asasggaaAfcAfGfCfaccucucucuL96 | 1664 | GGAAGGAAACAGCACCUCUCUC | 2204 |
| 1423640 | | | | | C | |
| AD- | asCfsugaAfgAfCfccucCfuGfgagagsasg | 1125 | csuscuccAfgGfAfGfggucuucaguL96 | 1665 | CUCUCUCCAGGAGGGUCUUCAG | 2205 |
| 1423655 | | | | | G | |
| AD- | asAfsgauCfcUfGfaagaCfcCfuccugsgsa | 1126 | csasggagGfgUfCfUfucaggaucuuL96 | 1666 | UCCAGGAGGGUCUUCAGGAUCU | 2206 |
| 1423660 | | | | | C | |
| AD- | asUfsggaUfgAfGfauccUfgAfagaccscsu | 1127 | gsgsucuuCfaGfGfAfucucauccauL96 | 1667 | AGGGUCUUCAGGAUCUCAUCCA | 2207 |
| 1423666 | | | | | C | |
| AD- | asCfsuguGfuGfGfaugaGfaUfccugasasg | 1128 | uscsaggaUfcUfCfAfuccacacaguL96 | 1668 | CUUCAGGAUCUCAUCCACACAG | 2208 |
| 1423671 | | | | | C | |
| AD- | asCfsaagGfuGfGfcuguGfuGfgaugasgsa | 1129 | uscsauccAfcAfCfAfgccaccuuguL96 | 1669 | UCUCAUCCACACAGCCACCUUG | 2209 |
| 1423679 | | | | | G | |
| AD- | asGfsucaCfcAfAfggugGfcUfgugugsgsa | 1130 | csascacaGfcCfAfCfcuuggugacuL96 | 1670 | UCCACACAGCCACCUUGGUGAC | 2210 |
| 1423684 | | | | | C | |
| AD- | asUfsacaGfgUfCfaccaAfgGfuggcusgsu | 1131 | asgsccacCfuUfGfGfugaccuguauL96 | 1671 | ACAGCCACCUUGGUGACCUGUA | 2211 |
| 1423689 | | | | | C | |
| AD- | asAfsaaaGfuAfCfagguCfaCfcaaggsusg | 1132 | cscsuuggUfgAfCfCfuguacuuuuuL96 | 1672 | CACCUUGGUGACCUGUACUUUU | 2212 |
| 1423694 | | | | | C | |
| AD- | asAfsguaGfaAfAfaguaCfaGfgucacscsa | 1133 | gsusgaccUfgUfAfCfuuuucuacuuL96 | 1673 | UGGUGACCUGUACUUUUCUAC | 2213 |
| 1423699 | | | | | UG | |
| AD- | asAfsugaCfcGfCfcaguAfgAfaaagusasc | 1134 | ascsuuuuCfuAfCfUfggcggucauuL96 | 1674 | GUACUUUUCUACUGGCGGUCA | 2214 |
| 1423708 | | | | | UC | |
| AD- | asAfsgaaGfaUfGfaccgCfcAfguagasasa | 1135 | uscsuacuGfgCfGfGfucaucuucuuL96 | 1675 | UUUCUACUGGCGGUCAUCUUC | 2215 |
| 1423713 | | | | | UG | |
| AD- | asAfsaccCfaGfGfcagaAfgAfugaccsgsc | 1136 | gsgsucauCfuUfCfUfgccuggguuuL96 | 1676 | GCGGUCAUCUUCUGCCUGGGU | 2216 |
| 1423722 | | | | | UC | |
| AD- | asCfscauAfgGfAfacccAfgGfcagaasgsa | 1137 | ususcugcCfuGfGfGfuuccuaugguL96 | 1677 | UCUUCUGCCUGGGUUCCUAUG | 2217 |
| 1423729 | | | | | GC | |
| AD- | asAfsguuGfcCfAfuaggAfaCfccaggscsa | 1138 | cscsugggUfuCfCfUfauggcaacuuL96 | 1678 | UGCCUGGGUUCCUAUGGCAACU | 2218 |
| 1423734 | | | | | U | |
| AD- | asAfsaugAfaGfUfugccAfuAfggaacscsc | 1139 | gsusuccuAfuGfGfCfaacuucauuuL96 | 1679 | GGGUUCCUAUGGCAACUUCAUU | 2219 |
| 1423739 | | | | | G | |
| AD- | asAfsagaCfaAfUfgaagUfuGfccauasgsg | 1140 | usasuggcAfaCfUfUfcauugucuuuL96 | 1680 | CCUAUGGCAACUUCAUUGUCUU | 2220 |
| 1423744 | | | | | C | |
| AD- | asAfscaaGfaAfGfacaaUfgAfaguugscsc | 1141 | csasacuuCfaUfUfGfucuucuuguuL96 | 1681 | GGCAACUUCAUUGUCUUCUUG | 2221 |
| 1423749 | | | | | UC | |
| AD- | asGfsaagGfaCfAfagaaGfaCfaaugasasg | 1142 | uscsauugUfcUfUfCfuuguccuucuL96 | 1682 | CUUCAUUGUCUUCUUGUCCUUC | 2222 |
| 1423754 | | | | | U | |
| AD- | asUfscgaAfgAfAfggacAfaGfaagacsasa | 1143 | gsuscuucUfuGfUfCfcuucuucgauL96 | 1683 | UUGUCUUCUUGUCCUUCUUCG | 2223 |
| 1423757 | | | | | AU | |
| AD- | asCfsuggAfuCfGfaagaAfgGfacaagsasa | 1144 | csusugucCfuUfCfUfucgauccaguL96 | 1684 | UUCUUGUCCUUCUUCGAUCCAG | 2224 |
| 1423762 | | | | | C | |
| AD- | asGfsaagGfcUfGfgaucGfaAfgaaggsasc | 1145 | cscsuucuUfcGfAfUfccagccuucuL96 | 1685 | GUCCUUCUUCGAUCCAGCCUUC | 2225 |
| 1423767 | | | | | A | |
| AD- | asAfsauuUfcCfUfgaagGfcUfggaucsgsa | 1146 | gsasuccaGfcCfUfUfcaggaaauuuL96 | 1686 | UCGAUCCAGCCUUCAGGAAAUU | 2226 |
| 1423775 | | | | | C | |
| AD- | asUfsucuGfaAfUfuuccUfgAfaggcusgsg | 1147 | asgsccuuCfaGfGfAfaauucagaauL96 | 1687 | CCAGCCUUCAGGAAAUUCAGAA | 2227 |
| 1423780 | | | | | C | |
| AD- | asGfsuugGfuUfCfugaaUfuUfccugasasg | 1148 | uscsaggaAfaUfUfCfagaaccaacuL96 | 1688 | CUUCAGGAAAUUCAGAACCAAC | 2228 |
| 1423785 | | | | | U | |
| AD- | asAfsaucAfaAfGfuuggUfuCfugaaususu | 1149 | asusucagAfaCfCfAfacuuugauuuL96 | 1689 | AAAUUCAGAACCAACUUUGAUU | 2229 |
| 1423792 | | | | | U | |
| AD- | asUfscauGfaAfAfucaaAfgUfugguuscsu | 1150 | asasccaaCfuUfUfGfauuucaugauL96 | 1690 | AGAACCAACUUUGAUUUCAUGA | 2230 |
| 1423798 | | | | | U | |
| AD- | asUfsucaGfgAfUfcaugAfaAfucaaasgsu | 1151 | ususugauUfuCfAfUfgauccugaauL96 | 1691 | ACUUUGAUUUCAUGAUCCUGAA | 2231 |
| 1423805 | | | | | C | |
| AD- | asGfsacaGfgUfUfcaggAfuCfaugaasasu | 1152 | ususcaugAfuCfCfUfgaaccugucuL96 | 1692 | AUUUCAUGAUCCUGAACCUGUC | 2232 |
| 1423811 | | | | | C | |
| AD- | asAfsgaaGfgAfCfagguUfcAfggaucsasu | 1153 | gsasuccuGfaAfCfCfuguccuucuuL96 | 1693 | AUGAUCCUGAACCUGUCCUUCU | 2233 |
| 1423816 | | | | | G | |
| AD- | asGfsgucAfcAfGfaaggAfcAfgguucsasg | 1154 | gsasaccuGfuCfCfUfucugugaccuL96 | 1694 | CUGAACCUGUCCUUCUGUGACC | 2234 |
| 1423822 | | | | | U | |
| AD- | asGfsaagAfgGfUfcacaGfaAfggacasgsg | 1155 | usgsuccuUfcUfGfUfgaccucuucuL96 | 1695 | CCUGUCCUUCUGUGACCUCUUC | 2235 |
| 1423827 | | | | | A | |
| AD- | asCfsaaaUfgAfAfgaggUfcAfcagaasgsg | 1156 | ususcuguGfaCfCfUfcuucauuuguL96 | 1696 | CCUUCUGUGACCUCUUCAUUUG | 2236 |
| 1423832 | | | | | U | |
| AD- | asAfscucCfaCfAfaaugAfaGfaggucsasc | 1157 | gsasccucUfuCfAfUfuuguggaguuL96 | 1697 | GUGACCUCUUCAUUUGUGGAG | 2237 |
| 1423838 | | | | | UG | |
| AD- | asCfsuguCfaCfUfccacAfaAfugaagsasg | 1158 | csusucauUfuGfUfGfgagugacaguL96 | 1698 | CUCUUCAUUUGUGGAGUGACA | 2238 |
| 1423843 | | | | | GC | |
| AD- | asAfsuaaCfaCfAfaaggUfgAfacaugsgsg | 1159 | csasuguuCfaCfCfUfuuguguuauuL96 | 1699 | CCCAUGUUCACCUUUGUGUUAU | 2239 |
| 1423846 | | | | | U | |
| AD- | asGfsaagAfaUfAfacacAfaAfggugasasc | 1160 | uscsaccuUfuGfUfGfuuauucuucuL96 | 1700 | GUUCACCUUUGUGUUAUUCUU | 2240 |
| 1423851 | | | | | CA | |
| AD- | asGfsagcUfgAfAfgaauAfaCfacaaasgsg | 1161 | ususugugUfuAfUfUfcuucagcucuL96 | 1701 | CCUUUGUGUUAUUCUUCAGCU | 2241 |
| 1423856 | | | | | CA | |
| AD- | asUfsggcUfgAfGfcugaAfgAfauaacsasc | 1162 | gsusuauuCfuUfCfAfgcucagccauL96 | 1702 | GUGUUAUUCUUCAGCUCAGCCA | 2242 |
| 1423861 | | | | | G | |
| AD- | asGfsgauAfcUfAfcuggCfuGfagcugsasa | 1163 | csasgcucAfgCfCfAfguaguauccuL96 | 1703 | UUCAGCUCAGCCAGUAGUAUCC | 2243 |
| 1423870 | | | | | C | |
| AD- | asAfsuccGfgGfAfuacuAfcUfggcugsasg | 1164 | csasgccaGfuAfGfUfaucccggauuL96 | 1704 | CUCAGCCAGUAGUAUCCCGGAU | 2244 |
| 1423875 | | | | | G | |
| AD- | asAfsgaaAfgCfAfuccgGfgAfuacuascsu | 1165 | usasguauCfcCfGfGfaugcuuucuuL96 | 1705 | AGUAGUAUCCCGGAUGCUUUCU | 2245 |
| 1423882 | | | | | G | |
| AD- | asGfsaagCfaGfAfaagcAfuCfcgggasusa | 1166 | uscsccggAfuGfCfUfuucugcuucuL96 | 1706 | UAUCCCGGAUGCUUUCUGCUUC | 2246 |
| 1423887 | | | | | A | |
| AD- | asAfsaagUfgAfAfgcagAfaAfgcaucscsg | 1167 | gsasugcuUfuCfUfGfcuucacuuuuL96 | 1707 | CGGAUGCUUUCUGCUUCACUU | 2247 |
| 1423892 | | | | | UC | |
| AD- | asGfsaugGfaAfAfgugaAfgCfagaaasgsc | 1168 | ususucugCfuUfCfAfcuuuccaucuL96 | 1708 | GCUUUCUGCUUCACUUUCCAUC | 2248 |
| 1423897 | | | | | U | |
| AD- | asAfsacuGfgUfGfagauGfgAfaagugsasa | 1169 | csascuuuCfcAfUfCfucaccaguuuL96 | 1709 | UUCACUUUCCAUCUCACCAGUU | 2249 |
| 1423906 | | | | | C | |
| AD- | asAfsgccUfgAfAfcuggUfgAfgauggsasa | 1170 | cscsaucuCfaCfCfAfguucaggcuuL96 | 1710 | UUCCAUCUCACCAGUUCAGGCU | 2250 |
| 1423912 | | | | | U | |
| AD- | asGfsaugAfaGfCfcugaAfcUfggugasgsa | 1171 | uscsaccaGfuUfCfAfggcuucaucuL96 | 1711 | UCUCACCAGUUCAGGCUUCAUC | 2251 |
| 1423917 | | | | | A | |
| AD- | asAfsugaUfgAfUfgaagCfcUfgaacusgsg | 1172 | asgsuucaGfgCfUfUfcaucaucauuL96 | 1712 | CCAGUUCAGGCUUCAUCAUCAU | 2252 |
| 1423922 | | | | | G | |
| AD- | asGfsagaCfaUfGfaugaUfgAfagccusgsa | 1173 | asgsgcuuCfaUfCfAfucaugucucuL96 | 1713 | UCAGGCUUCAUCAUCAUGUCUC | 2253 |
| 1423927 | | | | | U | |
| AD- | asCfsuucAfgAfGfacauGfaUfgaugasasg | 1174 | uscsaucaUfcAfUfGfucucugaaguL96 | 1714 | CUUCAUCAUCAUGUCUCUGAAG | 2254 |
| 1423932 | | | | | A | |
| AD- | asAfscugUfcUfUfcagaGfaCfaugausgsa | 1175 | asuscaugUfcUfCfUfgaagacaguuL96 | 1715 | UCAUCAUGUCUCUGAAGACAGU | 2255 |
| 1423937 | | | | | G | |
| AD- | asAfscugCfcAfCfugucUfuCfagagascsa | 1176 | uscsucugAfaGfAfCfaguggcaguuL96 | 1716 | UGUCUCUGAAGACAGUGGCAG | 2256 |
| 1423943 | | | | | UG | |
| AD- | asGfscagGfgCfGfaucaCfuGfccacusgsu | 1177 | asgsuggcAfgUfGfAfucgcccugcuL96 | 1717 | ACAGUGGCAGUGAUCGCCCUGC | 2257 |
| 1423954 | | | | | A | |
| AD- | asAfsacaCfcAfUfccggAfgCfcggugscsa | 1178 | csasccggCfuCfCfGfgaugguguuuL96 | 1718 | UGCACCGGCUCCGGAUGGUGUU | 2258 |
| 1423969 | | | | | G | |
| AD- | asAfsggcCfgUfGfcgauUfaGfgcugususu | 1179 | ascsagccUfaAfUfCfgcacggccuuL96 | 1719 | AAACAGCCUAAUCGCACGGCCU | 2259 |
| 1423977 | | | | | C | |
| AD- | asAfsaagGfaGfGfccguGfcGfauuagsgsc | 1180 | csusaaucGfcAfCfGfgccuccuuuuL96 | 1720 | GCCUAAUCGCACGGCCUCCUUU | 2260 |
| 1423982 | | | | | C | |
| AD- | asCfsaggGfaAfAfggagGfcCfgugcgsasu | 1181 | csgscacgGfcCfUfCfcuuucccuguL96 | 1721 | AUCGCACGGCCUCCUUUCCCUG | 2261 |
| 1423987 | | | | | C | |
| AD- | asUfsacgGfuGfCfagggAfaAfggaggscsc | 1182 | cscsuccuUfuCfCfCfugcaccguauL96 | 1722 | GGCCUCCUUUCCCUGCACCGUA | 2262 |
| 1423994 | | | | | C | |
| AD- | asAfsggaGfuAfCfggugCfaGfggaaasgsg | 1183 | ususucccUfgCfAfCfcguacuccuuL96 | 1723 | CCUUUCCCUGCACCGUACUCCU | 2263 |
| 1423999 | | | | | C | |
| AD- | asAfsgggUfgAfGfgaguAfcGfgugcasgsg | 1184 | usgscaccGfuAfCfUfccucacccuuL96 | 1724 | CCUGCACCGUACUCCUCACCCUG | 2264 |
| 1424005 | | | | | | |
| AD- | asAfsgagAfaGfCfagggUfgAfggagusasc | 1185 | ascsuccuCfaCfCfCfugcuucucuuL96 | 1725 | GUACUCCUCACCCUGCUUCUCU | 2265 |
| 1424013 | | | | | G | |
| AD- | asGfsuggCfcCfAfgagaAfgCfagggusgsa | 1186 | ascsccugCfuUfCfUfcugggccacuL96 | 1726 | UCACCCUGCUUCUCUGGGCCAC | 2266 |
| 1424020 | | | | | C | |
| AD- | asAfsaacUfgGfUfggccCfaGfagaagscsa | 1187 | csusucucUfgGfGfCfcaccaguuuuL96 | 1727 | UGCUUCUCUGGGCCACCAGUUU | 2267 |
| 1424026 | | | | | C | |
| AD- | asGfsgguGfaAfAfcuggUfgGfcccagsasg | 1188 | csusgggcCfaCfCfAfguuucacccuL96 | 1728 | CUCUGGGCCACCAGUUUCACCC | 2268 |
| 1424031 | | | | | U | |
| AD- | asUfsggcAfaGfGfgugaAfaCfuggugsgsc | 1189 | csasccagUfuUfCfAfcccuugccauL96 | 1729 | GCCACCAGUUUCACCCUUGCCA | 2269 |
| 1424037 | | | | | C | |
| AD- | asAfsgccAfaGfGfuggcAfaGfggugasasa | 1190 | uscsacccUfuGfCfCfaccuuggcuuL96 | 1730 | UUUCACCCUUGCCACCUUGGCU | 2270 |
| 1424045 | | | | | A | |
| AD- | asUfsucaAfgGfUfagccAfaGfguggcsasa | 1191 | gscscaccUfuGfGfCfuaccuugaauL96 | 1731 | UUGCCACCUUGGCUACCUUGAA | 2271 |
| 1424053 | | | | | A | |
| AD- | asUfsgguUfuUfCfaaggUfaGfccaagsgsu | 1192 | csusuggcUfaCfCfUfugaaaaccauL96 | 1732 | ACCUUGGCUACCUUGAAAACCA | 2272 |
| 1424058 | | | | | G | |
| AD- | asAfscuuGfcUfGfguuuUfcAfagguasgsc | 1193 | usasccuuGfaAfAfAfccagcaaguuL96 | 1733 | GCUACCUUGAAAACCAGCAAGU | 2273 |
| 1424064 | | | | | C | |
| AD- | asAfsgagGfuGfGfgacuUfgCfugguususu | 1194 | asasccagCfaAfGfUfcccaccucuuL96 | 1734 | AAAACCAGCAAGUCCCACCUCUG | 2274 |
| 1424073 | | | | | | |
| AD- | asGfsgaaGfaCfAfgaggUfgGfgacuusgsc | 1195 | asasguccCfaCfCfUfcugucuuccuL96 | 1735 | GCAAGUCCCACCUCUGUCUUCC | 2275 |
| 1424080 | | | | | C | |
| AD- | asGfsacaUfgGfGfaagaCfaGfaggugsgsg | 1196 | csasccucUfgUfCfUfucccaugucuL96 | 1736 | CCCACCUCUGUCUUCCCAUGUC | 2276 |
| 1424086 | | | | | C | |
| AD- | asGfsacuGfgAfCfauggGfaAfgacagsasg | 1197 | csusgucuUfcCfCfAfuguccagucuL96 | 1737 | CUCUGUCUUCCCAUGUCCAGUC | 2277 |
| 1424091 | | | | | U | |
| AD- | asAfsaucAfgAfCfuggaCfaUfgggaasgsa | 1198 | ususcccaUfgUfCfCfagucugauuuL96 | 1738 | UCUUCCCAUGUCCAGUCUGAUU | 2278 |
| 1424096 | | | | | G | |
| AD- | asUfsuuuCfcAfGfcaauCfaGfacuggsasc | 1199 | cscsagucUfgAfUfUfgcuggaaaauL96 | 1739 | GUCCAGUCUGAUUGCUGGAAAA | 2279 |
| 1424105 | | | | | G | |
| AD- | asUfsuucCfcUfUfuuccAfgCfaaucasgsa | 1200 | usgsauugCfuGfGfAfaaagggaaauL96 | 1740 | UCUGAUUGCUGGAAAAGGGAA | 2280 |
| 1424111 | | | | | AG | |
| AD- | asAfsaugGfcUfUfucccUfuUfuccagscsa | 1201 | csusggaaAfaGfGfGfaaagccauuuL96 | 1741 | UGCUGGAAAAGGGAAAGCCAUU | 2281 |
| 1424117 | | | | | U | |
| AD- | asAfsgacAfaAfAfuggcUfuUfcccuususu | 1202 | asasgggaAfaGfCfCfauuuugucuuL96 | 1742 | AAAAGGGAAAGCCAUUUUGUCU | 2282 |
| 1424123 | | | | | C | |
| AD- | asCfsauaGfaGfAfgacaAfaAfuggcususu | 1203 | asgsccauUfuUfGfUfcucucuauguL96 | 1743 | AAAGCCAUUUUGUCUCUCUAUG | 2283 |
| 1424130 | | | | | U | |
| AD- | asGfsaccAfcAfUfagagAfgAfcaaaasusg | 1204 | ususuuguCfuCfUfCfuauguggucuL96 | 1744 | CAUUUUGUCUCUCUAUGUGGU | 2284 |
| 1424135 | | | | | CG | |
| AD- | asAfsaguCfgAfCfcacaUfaGfagagascsa | 1205 | uscsucucUfaUfGfUfggucgacuuuL96 | 1745 | UGUCUCUCUAUGUGGUCGACU | 2285 |
| 1424140 | | | | | UC | |
| AD- | asAfsgaaGfgUfGfaaguCfgAfccacasusa | 1206 | usgsugguCfgAfCfUfucaccuucuuL96 | 1746 | UAUGUGGUCGACUUCACCUUCU | 2286 |
| 1424148 | | | | | G | |
| AD- | asCfsaacAfcAfGfaaggUfgAfagucgsasc | 1207 | csgsacuuCfaCfCfUfucuguguuguL96 | 1747 | GUCGACUUCACCUUCUGUGUU | 2287 |
| 1424154 | | | | | GC | |
| AD- | asAfsccaCfaGfCfaacaCfaGfaaggusgsa | 1208 | ascscuucUfgUfGfUfugcugugguuL96 | 1748 | UCACCUUCUGUGUUGCUGUGG | 2288 |
| 1424161 | | | | | UC | |
| AD- | asAfsgacAfgAfGfaccaCfaGfcaacascsa | 1209 | usgsuugcUfgUfGfGfucucugucuuL96 | 1749 | UGUGUUGCUGUGGUCUCUGUC | 2289 |
| 1424169 | | | | | UC | |
| AD- | asUfsguaAfgAfGfacagAfgAfccacasgsc | 1210 | usgsugguCfuCfUfGfucucuuacauL96 | 1750 | GCUGUGGUCUCUGUCUCUUAC | 2290 |
| 1424175 | | | | | AU | |
| AD- | asCfsaugAfuGfUfaagaGfaCfagagascsc | 1211 | uscsucugUfcUfCfUfuacaucauguL96 | 1751 | GGUCUCUGUCUCUUACAUCAUG | 2291 |
| 1424180 | | | | | A | |
| AD- | asUfsgagCfaAfUfcaugAfuGfuaagasgsa | 1212 | uscsuuacAfuCfAfUfgauugcucauL96 | 1752 | UCUCUUACAUCAUGAUUGCUCA | 2292 |
| 1424188 | | | | | G | |
| AD- | asAfsgggUfcUfGfagcaAfuCfaugausgsu | 1213 | asuscaugAfuUfGfCfucagacccuuL96 | 1753 | ACAUCAUGAUUGCUCAGACCCU | 2293 |
| 1424194 | | | | | G | |
| AD- | asAfsgcgUfuCfUfuccgCfaGfggucusgsa | 1214 | asgsacccUfgCfGfGfaagaacgcuuL96 | 1754 | UCAGACCCUGCGGAAGAACGCU | 2294 |
| 1424207 | | | | | C | |
| AD- | asGfsacuUfgAfGfcguuCfuUfccgcasgsg | 1215 | usgscggaAfgAfAfCfgcucaagucuL96 | 1755 | CCUGCGGAAGAACGCUCAAGUC | 2295 |
| 1424213 | | | | | A | |
| AD- | asUfsuucUfgAfCfuugaGfcGfuucuuscsc | 1216 | asasgaacGfcUfCfAfagucagaaauL96 | 1756 | GGAAGAACGCUCAAGUCAGAAA | 2296 |
| 1424218 | | | | | G | |
| AD- | asGfsgcaCfuUfUfcugaCfuUfgagcgsusu | 1217 | csgscucaAfgUfCfAfgaaagugccuL96 | 1757 | AACGCUCAAGUCAGAAAGUGCC | 2297 |
| 1424223 | | | | | C | |
| AD- | asGfsaagCfaUfCfgacuGfuGfauuacsasg | 1218 | gsusaaucAfcAfGfUfcgaugcuucuL96 | 1758 | CUGUAAUCACAGUCGAUGCUUC | 2298 |
| 1424226 | | | | | C | |
| AD- | asGfsuggUfcUfGfgaagCfaUfcgacusgsu | 1219 | asgsucgaUfgCfUfUfccagaccacuL96 | 1759 | ACAGUCGAUGCUUCCAGACCAC | 2299 |
| 1424234 | | | | | A | |
| AD- | asAfsaagGfcUfGfugguCfuGfgaagcsasu | 1220 | gscsuuccAfgAfCfCfacagccuuuuL96 | 1760 | AUGCUUCCAGACCACAGCCUUU | 2300 |
| 1424241 | | | | | C | |
| AD- | asCfscauGfaAfAfggcuGfuGfgucugsgsa | 1221 | csasgaccAfcAfGfCfcuuucaugguL96 | 1761 | UCCAGACCACAGCCUUUCAUGG | 2301 |
| 1424246 | | | | | G | |
| AD- | asAfscacUfgGfAfugggAfuCfuccacscsu | 1222 | gsusggagAfuCfCfCfauccaguguuL96 | 1762 | AGGUGGAGAUCCCAUCCAGUGU | 2302 |
| 1424265 | | | | | G | |
| AD- | asAfsuggCfaCfAfcuggAfuGfggaucsusc | 1223 | gsasucccAfuCfCfAfgugugccauuL96 | 1763 | GAGAUCCCAUCCAGUGUGCCAU | 2303 |
| 1424270 | | | | | G | |
| AD- | asGfsuucCfuAfUfacagAfgCfcggcasusg | 1224 | usgsccggCfuCfUfGfuauaggaacuL96 | 1764 | CAUGCCGGCUCUGUAUAGGAAC | 2304 |
| 1424289 | | | | | C | |
| AD- | asUfsucuGfgUfUfccuaUfaCfagagcscsg | 1225 | gscsucugUfaUfAfGfgaaccagaauL96 | 1765 | CGGCUCUGUAUAGGAACCAGAA | 2305 |
| 1424294 | | | | | U | |
| AD- | asUfsguaAfuUfCfugguUfcCfuauacsasg | 1226 | gsusauagGfaAfCfCfagaauuacauL96 | 1766 | CUGUAUAGGAACCAGAAUUACA | 2306 |
| 1424299 | | | | | A | |
| AD- | asGfsuuuGfuUfGfuaauUfcUfgguucscsu | 1227 | gsasaccaGfaAfUfUfacaacaaacuL96 | 1767 | AGGAACCAGAAUUACAACAAAC | 2307 |
| 1424305 | | | | | U | |
| AD- | asUfsgcuGfcAfGfuuugUfuGfuaauuscsu | 1228 | asasuuacAfaCfAfAfacugcagcauL96 | 1768 | AGAAUUACAACAAACUGCAGCA | 2308 |
| 1424312 | | | | | C | |
| AD- | asUfsgaaCfgUfGfcugcAfgUfuuguusgsu | 1229 | asascaaaCfuGfCfAfgcacguucauL96 | 1769 | ACAACAAACUGCAGCACGUUCA | 2309 |
| 1424318 | | | | | G | |
| AD- | asCfsgggUfcUfGfaacgUfgCfugcagsusu | 1230 | csusgcagCfaCfGfUfucagacccguL96 | 1770 | AACUGCAGCACGUUCAGACCCG | 2310 |
| 1424324 | | | | | U | |
| AD- | asUfsaucCfaCfGfggucUfgAfacgugscsu | 1231 | csascguuCfaGfAfCfccguggauauL96 | 1771 | AGCACGUUCAGACCCGUGGAUA | 2311 |
| 1424330 | | | | | U | |
| AD- | asUfsuggUfaUfAfuccaCfgGfgucugsasa | 1232 | csasgaccCfgUfGfGfauauaccaauL96 | 1772 | UUCAGACCCGUGGAUAUACCAA | 2312 |
| 1424336 | | | | | G | |
| AD- | asGfsacuCfuUfGfguauAfuCfcacggsgsu | 1233 | cscsguggAfuAfUfAfccaagagucuL96 | 1773 | ACCCGUGGAUAUACCAAGAGUC | 2313 |
| 1424341 | | | | | C | |
| AD- | asGfsuugGfgAfCfucuuGfgUfauaucscsa | 1234 | gsasuauaCfcAfAfGfagucccaacuL96 | 1774 | UGGAUAUACCAAGAGUCCCAAC | 2314 |
| 1424346 | | | | | C | |
| AD- | asAfsguuGfgUfUfgggaCfuCfuuggusasu | 1235 | ascscaagAfgUfCfCfcaaccaacuuL96 | 1775 | AUACCAAGAGUCCCAACCAACU | 2315 |
| 1424351 | | | | | G | |
| AD- | asGfsugaCfcAfGfuuggUfuGfggacuscsu | 1236 | asgsucccAfaCfCfAfacuggucacuL96 | 1776 | AGAGUCCCAACCAACUGGUCAC | 2316 |
| 1424357 | | | | | C | |
| AD- | asAfscgaGfcUfGfgaguCfgGfcuugcsusg | 1237 | gscsaagcCfgAfCfUfccagcucguuL96 | 1777 | CAGCAAGCCGACUCCAGCUCGU | 2317 |
| 1424364 | | | | | A | |
| AD- | asGfscugAfuAfCfgagcUfgGfagucgsgsc | 1238 | csgsacucCfaGfCfUfcguaucagcuL96 | 1778 | GCCGACUCCAGCUCGUAUCAGC | 2318 |
| 1424370 | | | | | C | |
| AD- | asAfsgguUfgAfUfggcuGfaUfacgagscsu | 1239 | csuscguaUfcAfGfCfcaucaaccuuL96 | 1779 | AGCUCGUAUCAGCCAUCAACCU | 2319 |
| 1424379 | | | | | C | |
| AD- | asCfsaguGfgAfGfagguUfgAfuggcusgsa | 1240 | asgsccauCfaAfCfCfucuccacuguL96 | 1780 | UCAGCCAUCAACCUCUCCACUGC | 2320 |
| 1424387 | | | | | | |
| AD- | asCfsuugGfcAfGfuggaGfaGfguugasusg | 1241 | uscsaaccUfcUfCfCfacugccaaguL96 | 1781 | CAUCAACCUCUCCACUGCCAAGG | 2321 |
| 1424392 | | | | | | |
| AD- | asGfsaauCfcUfUfggcaGfuGfgagagsgsu | 1242 | csuscuccAfcUfGfCfcaaggauucuL96 | 1782 | ACCUCUCCACUGCCAAGGAUUC | 2322 |
| 1424397 | | | | | C | |
| AD- | asCfsggcUfuUfGfgaauCfcUfuggcasgsu | 1243 | usgsccaaGfgAfUfUfccaaagccguL96 | 1783 | ACUGCCAAGGAUUCCAAAGCCG | 2323 |
| 1424405 | | | | | U | |
| AD- | asGfsugaCfcAfCfggcuUfuGfgaaucscsu | 1244 | gsasuuccAfaAfGfCfcguggucacuL96 | 1784 | AGGAUUCCAAAGCCGUGGUCAC | 2324 |
| 1424412 | | | | | C | |
| AD- | asAfscacAfgGfUfgaccAfcGfgcuuusgsg | 1245 | asasagccGfuGfGfUfcaccuguguuL96 | 1785 | CCAAAGCCGUGGUCACCUGUGU | 2325 |
| 1424418 | | | | | G | |
| AD- | asAfsaugAfuCfAfcacaGfgUfgaccascsg | 1246 | usgsgucaCfcUfGfUfgugaucauuuL96 | 1786 | CGUGGUCACCUGUGUGAUCAU | 2326 |
| 1424425 | | | | | UG | |
| AD- | asAfsgcaCfaAfUfgaucAfcAfcaggusgsa | 1247 | ascscuguGfuGfAfUfcauugugcuuL96 | 1787 | UCACCUGUGUGAUCAUUGUGC | 2327 |
| 1424430 | | | | | UG | |
| AD- | asAfscugAfcAfGfcacaAfuGfaucacsasc | 1248 | gsusgaucAfuUfGfUfgcugucaguuL96 | 1788 | GUGUGAUCAUUGUGCUGUCAG | 2328 |
| 1424436 | | | | | UC | |
| AD- | asCfsacaCfcAfGfgacuGfaCfagcacsasa | 1249 | gsusgcugUfcAfGfUfccugguguguL96 | 1789 | UUGUGCUGUCAGUCCUGGUGU | 2329 |
| 1424445 | | | | | GC | |
| AD- | asAfsgacAfgCfAfcaccAfgGfacugascsa | 1250 | uscsagucCfuGfGfUfgugcugucuuL96 | 1790 | UGUCAGUCCUGGUGUGCUGUC | 2330 |
| 1424451 | | | | | UU | |
| AD- | asAfsgugGfaAfGfacagCfaCfaccagsgsa | 1251 | csusggugUfgCfUfGfucuuccacuuL96 | 1791 | UCCUGGUGUGCUGUCUUCCACU | 2331 |
| 1424457 | | | | | G | |
| AD- | asAfsaccAfcCfUfguacCfaAfggaaasusc | 1252 | ususuccuUfgGfUfAfcaggugguuuL96 | 1792 | GAUUUCCUUGGUACAGGUGGU | 2332 |
| 1424464 | | | | | UC | |
| AD- | asGfsagaGfaAfCfcaccUfgUfaccaasgsg | 1253 | ususgguaCfaGfGfUfgguucucucuL96 | 1793 | CCUUGGUACAGGUGGUUCUCU | 2333 |
| 1424469 | | | | | CC | |
| AD- | asCfscauUfgCfUfggagAfgAfaccacscsu | 1254 | gsusgguuCfuCfUfCfcagcaaugguL96 | 1794 | AGGUGGUUCUCUCCAGCAAUGG | 2334 |
| 1424478 | | | | | G | |
| AD- | asGfsaagCfuCfCfcauuGfcUfggagasgsa | 1255 | uscsuccaGfcAfAfUfgggagcuucuL96 | 1795 | UCUCUCCAGCAAUGGGAGCUUC | 2335 |
| 1424485 | | | | | A | |
| AD- | asUfsaaaGfaAfUfgaagCfuCfccauusgsc | 1256 | asasugggAfgCfUfUfcauucuuuauL96 | 1796 | GCAAUGGGAGCUUCAUUCUUU | 2336 |
| 1424493 | | | | | AC | |
| AD- | asUfscaaAfcUfGfguaaAfgAfaugaasgsc | 1257 | ususcauuCfuUfUfAfccaguuugauL96 | 1797 | GCUUCAUUCUUUACCAGUUUG | 2337 |
| 1424502 | | | | | AA | |
| AD- | asAfsacaAfuUfCfaaacUfgGfuaaagsasa | 1258 | csusuuacCfaGfUfUfugaauuguuuL96 | 1798 | UUCUUUACCAGUUUGAAUUGU | 2338 |
| 1424508 | | | | | UU | |
| AD- | asAfsaucCfaAfAfcaauUfcAfaacugsgsu | 1259 | csasguuuGfaAfUfUfguuuggauuuL96 | 1799 | ACCAGUUUGAAUUGUUUGGAU | 2339 |
| 1424514 | | | | | UU | |
| AD- | asAfsagaGfuAfAfauccAfaAfcaauuscsa | 1260 | asasuuguUfuGfGfAfuuuacucuuuL96 | 1800 | UGAAUUGUUUGGAUUUACUCU | 2340 |
| 1424520 | | | | | UA | |
| AD- | asCfsugaCfuUfGfaaaaAfuAfuaagasgsu | 1261 | uscsuuauAfuUfUfUfucaagucaguL96 | 1801 | ACUCUUAUAUUUUUCAAGUCA | 2341 |
| 1424531 | | | | | GG | |
| AD- | asGfsguuUfaAfUfccugAfcUfugaaasasa | 1262 | ususucaaGfuCfAfGfgauuaaaccuL96 | 1802 | UUUUUCAAGUCAGGAUUAAACC | 2342 |
| 1424540 | | | | | C | |
| AD- | asUfsaaaAfgGfGfuuuaAfuCfcugacsusu | 1263 | gsuscaggAfuUfAfAfacccuuuuauL96 | 1803 | AAGUCAGGAUUAAACCCUUUUA | 2343 |
| 1424546 | | | | | U | |
| AD- | asCfsgagAfaUfAfuauaAfaAfggguususa | 1264 | asascccuUfuUfAfUfauauucucguL96 | 1804 | UAAACCCUUUUAUAUAUUCUCG | 2344 |
| 1424553 | | | | | G | |
| AD- | asUfsguuCfcGfAfgaauAfuAfuaaaasgsg | 1265 | ususuuauAfuAfUfUfcucggaacauL96 | 1805 | CCUUUUAUAUAUUCUCGGAACA | 2345 |
| 1424558 | | | | | G | |
| AD- | asUfsgcaCfuGfUfuccgAfgAfauauasusa | 1266 | usasuauuCfuCfGfGfaacagugcauL96 | 1806 | UAUAUAUUCUCGGAACAGUGCA | 2346 |
| 1424563 | | | | | G | |
| AD- | asAfsgccCfuGfCfacugUfuCfcgagasasu | 1267 | uscsucggAfaCfAfGfugcagggcuuL96 | 1807 | AUUCUCGGAACAGUGCAGGGCU | 2347 |
| 1424568 | | | | | G | |
| AD- | asAfscuuUfcCfUfucucAfgCfccugcsasc | 1268 | gscsagggCfuGfAfGfaaggaaaguuL96 | 1808 | GUGCAGGGCUGAGAAGGAAAG | 2348 |
| 1424580 | | | | | UG | |
| AD- | asAfsgagCfaCfUfuuccUfuCfucagcscsc | 1269 | gscsugagAfaGfGfAfaagugcucuuL96 | 1809 | GGGCUGAGAAGGAAAGUGCUC | 2349 |
| 1424585 | | | | | UG | |
| AD- | asGfscacCfaGfAfgcacUfuUfccuucsusc | 1270 | gsasaggaAfaGfUfGfcucuggugcuL96 | 1810 | GAGAAGGAAAGUGCUCUGGUG | 2350 |
| 1424590 | | | | | CC | |
| AD- | asCfsuauGfuAfUfuggaGfgCfaccagsasg | 1271 | csusggugCfcUfCfCfaauacauaguL96 | 1811 | CUCUGGUGCCUCCAAUACAUAG | 2351 |
| 1424603 | | | | | G | |
| AD- | asCfscagGfcCfUfauguAfuUfggaggscsa | 1272 | cscsuccaAfuAfCfAfuaggccugguL96 | 1812 | UGCCUCCAAUACAUAGGCCUGG | 2352 |
| 1424609 | | | | | G | |
| AD- | asAfsaaaCfcCfAfggccUfaUfguauusgsg | 1273 | asasuacaUfaGfGfCfcuggguuuuuL96 | 1813 | CCAAUACAUAGGCCUGGGUUUU | 2353 |
| 1424614 | | | | | U | |
| AD- | asUfscuuUfuGfUfuugcAfgCfagaaasasa | 1274 | ususucugCfuGfCfAfaacaaaagauL96 | 1814 | UUUUUCUGCUGCAAACAAAAGA | 2354 |
| 1424615 | | | | | C | |
| AD- | asAfsgucGfaGfUfcuuuUfgUfuugcasgsc | 1275 | usgscaaaCfaAfAfAfgacucgacuuL96 | 1815 | GCUGCAAACAAAAGACUCGACU | 2355 |
| 1424622 | | | | | U | |
| AD- | asCfsucgAfaGfUfcgagUfcUfuuugususu | 1276 | ascsaaaaGfaCfUfCfgacuucgaguL96 | 1816 | AAACAAAAGACUCGACUUCGAG | 2356 |
| 1424627 | | | | | C | |
| AD- | asCfsaugGfcUfCfgaagUfcGfagucususu | 1277 | asgsacucGfaCfUfUfcgagccauguL96 | 1817 | AAAGACUCGACUUCGAGCCAUG | 2357 |
| 1424632 | | | | | G | |
| AD- | asUfsuuuCfcCfAfuggcUfcGfaagucsgsa | 1278 | gsascuucGfaGfCfCfaugggaaaauL96 | 1818 | UCGACUUCGAGCCAUGGGAAAA | 2358 |
| 1424638 | | | | | G | |
| AD- | asUfsuccCfuUfUfucccAfuGfgcucgsasa | 1279 | csgsagccAfuGfGfGfaaaagggaauL96 | 1819 | UUCGAGCCAUGGGAAAAGGGAA | 2359 |
| 1424643 | | | | | C | |
| AD- | asCfsgagGfuUfCfccuuUfuCfccaugsgsc | 1280 | csasugggAfaAfAfGfggaaccucguL96 | 1820 | GCCAUGGGAAAAGGGAACCUCG | 2360 |
| 1424648 | | | | | A | |
| AD- | asUfsugaCfuUfCfgaggUfuCfccuuususc | 1281 | asasagggAfaCfCfUfcgaagucaauL96 | 1821 | GAAAAGGGAACCUCGAAGUCAA | 2361 |
| 1424655 | | | | | C | |
| AD- | asUfsuucUfgUfUfgacuUfcGfagguuscsc | 1282 | asasccucGfaAfGfUfcaacagaaauL96 | 1822 | GGAACCUCGAAGUCAACAGAAA | 2362 |
| 1424661 | | | | | C | |
| AD- | asGfsauuUfgUfUfucugUfuGfacuucsgsa | 1283 | gsasagucAfaCfAfGfaaacaaaucuL96 | 1823 | UCGAAGUCAACAGAAACAAAUC | 2363 |
| 1424667 | | | | | C | |
| AD- | asGfsggaGfgAfUfuuguUfuCfuguugsasc | 1284 | csasacagAfaAfCfAfaauccucccuL96 | 1824 | GUCAACAGAAACAAAUCCUCCCA | 2364 |
| 1424672 | | | | | | |
| AD- | asCfsaugAfuGfGfgaggAfuUfuguuuscsu | 1285 | asasacaaAfuCfCfUfcccaucauguL96 | 1825 | AGAAACAAAUCCUCCCAUCAUG | 2365 |
| 1424678 | | | | | A | |
| AD- | asUfsuguUfuCfAfugauGfgGfaggaususu | 1286 | asusccucCfcAfUfCfaugaaacaauL96 | 1826 | AAAUCCUCCCAUCAUGAAACAA | 2366 |
| 1424684 | | | | | A | |
| AD- | asAfsgagUfuUfGfuuucAfuGfaugggsasg | 1287 | cscscaucAfuGfAfAfacaaacucuuL96 | 1827 | CUCCCAUCAUGAAACAAACUCU | 2367 |
| 1424689 | | | | | G | |
| AD- | asGfsuagGfcAfGfaguuUfgUfuucausgsa | 1288 | asusgaaaCfaAfAfCfucugccuacuL96 | 1828 | UCAUGAAACAAACUCUGCCUAC | 2368 |
| 1424695 | | | | | A | |
| AD- | asAfsgauAfaCfAfuguaGfgCfagagususu | 1289 | ascsucugCfcUfAfCfauguuaucuuL96 | 1829 | AAACUCUGCCUACAUGUUAUCU | 2369 |
| 1424704 | | | | | C | |
| AD- | asUfsuugGfaGfAfuaacAfuGfuaggcsasg | 1290 | gscscuacAfuGfUfUfaucuccaaauL96 | 1830 | CUGCCUACAUGUUAUCUCCAAA | 2370 |
| 1424709 | | | | | G | |
| AD- | asGfsuggCfuUfUfggagAfuAfacaugsusa | 1291 | csasuguuAfuCfUfCfcaaagccacuL96 | 1831 | UACAUGUUAUCUCCAAAGCCAC | 2371 |
| 1424714 | | | | | A | |
| AD- | asAfsuuuCfuUfCfugugGfcUfuuggasgsa | 1292 | uscscaaaGfcCfAfCfagaagaaauuL96 | 1832 | UCUCCAAAGCCACAGAAGAAAU | 2372 |
| 1424723 | | | | | U | |
| AD- | asCfsacaAfaUfUfucuuCfuGfuggcususu | 1293 | asgsccacAfgAfAfGfaaauuuguguL96 | 1833 | AAAGCCACAGAAGAAAUUUGUG | 2373 |
| 1424728 | | | | | G | |
| AD- | asUfsgguCfcAfCfaaauUfuCfuucugsusg | 1294 | csasgaagAfaAfUfUfuguggaccauL96 | 1834 | CACAGAAGAAAUUUGUGGACCA | 2374 |
| 1424733 | | | | | G | |
| AD- | asAfsagcCfuGfGfuccaCfaAfauuucsusu | 1295 | gsasaauuUfgUfGfGfaccaggcuuuL96 | 1835 | AAGAAAUUUGUGGACCAGGCU | 2375 |
| 1424738 | | | | | UG | |
| AD- | asAfscuuGfgGfCfcacaAfgCfcugguscsc | 1296 | ascscaggCfuUfGfUfggcccaaguuL96 | 1836 | GGACCAGGCUUGUGGCCCAAGU | 2376 |
| 1424749 | | | | | C | |
| AD- | asUfsuugAfaUfGfacuuGfgGfccacasasg | 1297 | usgsuggcCfcAfAfGfucauucaaauL96 | 1837 | CUUGUGGCCCAAGUCAUUCAAA | 2377 |
| 1424757 | | | | | A | |
| AD- | asUfsuucUfuUfUfgaauGfaCfuugggscsc | 1298 | cscscaagUfcAfUfUfcaaaagaaauL96 | 1838 | GGCCCAAGUCAUUCAAAAGAAA | 2378 |
| 1424762 | | | | | G | |
| AD- | asAfsccaUfaCfUfuucuUfuUfgaaugsasc | 1299 | csasuucaAfaAfGfAfaaguaugguuL96 | 1839 | GUCAUUCAAAAGAAAGUAUGG | 2379 |
| 1424769 | | | | | UG | |
| AD- | asGfsacuCfaCfCfauacUfuUfcuuuusgsa | 1300 | asasaagaAfaGfUfAfuggugagucuL96 | 1840 | UCAAAAGAAAGUAUGGUGAGUC | 2380 |
| 1424774 | | | | | C | |
| AD- | asAfsucuUfgGfGfacucAfcCfauacususu | 1301 | asgsuaugGfuGfAfGfucccaagauuL96 | 1841 | AAAGUAUGGUGAGUCCCAAGAU | 2381 |
| 1424781 | | | | | C | |
| AD- | asAfsgcaGfaGfAfucuuGfgGfacucascsc | 1302 | usgsagucCfcAfAfGfaucucugcuuL96 | 1842 | GGUGAGUCCCAAGAUCUCUGCU | 2382 |
| 1424788 | | | | | G | |
| AD- | asUfsgucCfaGfCfagagAfuCfuugggsasc | 1303 | cscscaagAfuCfUfCfugcuggacauL96 | 1843 | GUCCCAAGAUCUCUGCUGGACA | 2383 |
| 1424793 | | | | | U | |
| AD- | asGfsuugAfuGfUfccagCfaGfagaucsusu | 1304 | gsasucucUfgCfUfGfgacaucaacuL96 | 1844 | AAGAUCUCUGCUGGACAUCAAC | 2384 |
| 1424798 | | | | | A | |
| AD- | asAfscagUfgUfUfgaugUfcCfagcagsasg | 1305 | csusgcugGfaCfAfUfcaacacuguuL96 | 1845 | CUCUGCUGGACAUCAACACUGU | 2385 |
| 1424803 | | | | | G | |
| AD- | asCfsugaCfcAfCfagugUfuGfaugucscsa | 1306 | gsascaucAfaCfAfCfuguggucaguL96 | 1846 | UGGACAUCAACACUGUGGUCAG | 2386 |
| 1424809 | | | | | A | |
| AD- | asAfsgcuGfcUfCfugacCfaCfagugususg | 1307 | ascsacugUfgGfUfCfagagcagcuuL96 | 1847 | CAACACUGUGGUCAGAGCAGCU | 2387 |
| 1424816 | | | | | C | |
| AD- | asAfsaggUfuCfAfauccGfaGfuguugsasu | 1308 | csasacacUfcGfGfAfuugaaccuuuL96 | 1848 | AUCAACACUCGGAUUGAACCUU | 2388 |
| 1424825 | | | | | A | |
| AD- | asGfsuagUfaAfGfguucAfaUfccgagsusg | 1309 | csuscggaUfuGfAfAfccuuacuacuL96 | 1849 | CACUCGGAUUGAACCUUACUAC | 2389 |
| 1424830 | | | | | A | |
| AD- | asGfsaugCfuGfUfaguaAfgGfuucaasusc | 1310 | ususgaacCfuUfAfCfuacagcaucuL96 | 1850 | GAUUGAACCUUACUACAGCAUC | 2390 |
| 1424836 | | | | | U | |
| AD- | asUfsuauAfgAfUfgcugUfaGfuaaggsusu | 1311 | cscsuuacUfaCfAfGfcaucuauaauL96 | 1851 | AACCUUACUACAGCAUCUAUAA | 2391 |
| 1424841 | | | | | C | |
| AD- | asUfsgcuGfuUfAfuagaUfgCfuguagsusa | 1312 | csusacagCfaUfCfUfauaacagcauL96 | 1852 | UACUACAGCAUCUAUAACAGCA | 2392 |
| 1424846 | | | | | G | |
| AD- | asAfsaggGfcUfGfcuguUfaUfagaugscsu | 1313 | csasucuaUfaAfCfAfgcagcccuuuL96 | 1853 | AGCAUCUAUAACAGCAGCCCUU | 2393 |
| 1424852 | | | | | C | |
| AD- | asAfsaguUfaCfAfugggCfuGfcucucscsu | 1314 | gsasgagcAfgCfCfCfauguaacuuuL96 | 1854 | AGGAGAGCAGCCCAUGUAACUU | 2394 |
| 1424880 | | | | | A | |
| AD- | asGfscugUfaAfGfuuacAfuGfggcugscsu | 1315 | csasgcccAfuGfUfAfacuuacagcuL96 | 1855 | AGCAGCCCAUGUAACUUACAGC | 2395 |
| 1424885 | | | | | C | |
| AD- | asUfsuacUfgGfCfuguaAfgUfuacausgsg | 1316 | asusguaaCfuUfAfCfagccaguaauL96 | 1856 | CCAUGUAACUUACAGCCAGUAA | 2396 |
| 1424891 | | | | | A | |
| AD- | asAfsagaGfuUfUfacugGfcUfguaagsusu | 1317 | csusuacaGfcCfAfGfuaaacucuuuL96 | 1857 | AACUUACAGCCAGUAAACUCUU | 2397 |
| 1424897 | | | | | U | |
| AD- | asAfsaucCfaAfAfagagUfuUfacuggscsu | 1318 | cscsaguaAfaCfUfCfuuuuggauuuL96 | 1858 | AGCCAGUAAACUCUUUUGGAUU | 2398 |
| 1424904 | | | | | U | |
| AD- | asAfsuugGfcAfAfauccAfaAfagagususu | 1319 | ascsucuuUfuGfGfAfuuugccaauuL96 | 1859 | AAACUCUUUUGGAUUUGCCAAU | 2399 |
| 1424911 | | | | | U | |
| AD- | asAfsauaUfaUfGfaauuGfgCfaaaucscsa | 1320 | gsasuuugCfcAfAfUfucauauauuuL96 | 1860 | UGGAUUUGCCAAUUCAUAUAU | 2400 |
| 1424920 | | | | | UG | |
| AD- | asAfsugcAfuGfGfcaauAfuAfugaaususg | 1321 | asusucauAfuAfUfUfgccaugcauuL96 | 1861 | CAAUUCAUAUAUUGCCAUGCAU | 2401 |
| 1424929 | | | | | U | |
| AD- | asGfsugaUfaAfUfgcauGfgCfaauausasu | 1322 | asusauugCfcAfUfGfcauuaucacuL96 | 1862 | AUAUAUUGCCAUGCAUUAUCAC | 2402 |
| 1424935 | | | | | A | |
| AD- | asUfsuagUfgGfUfgugaUfaAfugcausgsg | 1323 | asusgcauUfaUfCfAfcaccacuaauL96 | 1863 | CCAUGCAUUAUCACACCACUAA | 2403 |
| 1424943 | | | | | U | |
| AD- | asAfsaguCfaUfUfagugGfuGfugauasasu | 1324 | usasucacAfcCfAfCfuaaugacuuuL96 | 1864 | AUUAUCACACCACUAAUGACUU | 2404 |
| 1424949 | | | | | A | |
| AD- | asGfscacUfaAfGfucauUfaGfuggugsusg | 1325 | csasccacUfaAfUfGfacuuagugcuL96 | 1865 | CACACCACUAAUGACUUAGUGC | 2405 |
| 1424954 | | | | | A | |
| AD- | asUfsauuCfcUfGfcacuAfaGfucauusasg | 1326 | asasugacUfuAfGfUfgcaggaauauL96 | 1866 | CUAAUGACUUAGUGCAGGAAUA | 2406 |
| 1424961 | | | | | U | |
| AD- | asCfsuguCfaUfAfuuccUfgCfacuaasgsu | 1327 | ususagugCfaGfGfAfauaugacaguL96 | 1867 | ACUUAGUGCAGGAAUAUGACAG | 2407 |
| 1424967 | | | | | C | |
| AD- | asAfsaguGfcUfGfucauAfuUfccugcsasc | 1328 | gscsaggaAfuAfUfGfacagcacuuuL96 | 1868 | GUGCAGGAAUAUGACAGCACUU | 2408 |
| 1424972 | | | | | C | |
| AD- | asUfsuggCfuGfAfagugCfuGfucauasusu | 1329 | usasugacAfgCfAfCfuucagccaauL96 | 1869 | AAUAUGACAGCACUUCAGCCAA | 2409 |
| 1424979 | | | | | G | |
| AD- | asGfsaauCfuGfCfuuggCfuGfaagugscsu | 1330 | csascuucAfgCfCfAfagcagauucuL96 | 1870 | AGCACUUCAGCCAAGCAGAUUC | 2410 |
| 1424987 | | | | | C | |
| AD- | asGfsacuGfgAfAfucugCfuUfggcugsasa | 1331 | csasgccaAfgCfAfGfauuccagucuL96 | 1871 | UUCAGCCAAGCAGAUUCCAGUC | 2411 |
| 1424992 | | | | | C | |
| AD- | asCfsuccAfuGfAfcuuuAfaAfcggagsgsg | 1332 | csusccguUfuAfAfAfgucauggaguL96 | 1872 | CCCUCCGUUUAAAGUCAUGGAG | 2412 |
| 1424994 | | | | | G | |
| AD- | asCfscuaUfaGfCfcuccAfuGfacuuusasa | 1333 | asasagucAfuGfGfAfggcuauagguL96 | 1873 | UUAAAGUCAUGGAGGCUAUAG | 2413 |
| 1425002 | | | | | GA | |
| AD- | asCfsauaAfgAfUfccuaUfaGfccuccsasu | 1334 | gsgsaggcUfaUfAfGfgaucuuauguL96 | 1874 | AUGGAGGCUAUAGGAUCUUAU | 2414 |
| 1425010 | | | | | GU | |
| AD- | asGfsuuuAfcAfUfaagaUfcCfuauagscsc | 1335 | csusauagGfaUfCfUfuauguaaacuL96 | 1875 | GGCUAUAGGAUCUUAUGUAAA | 2415 |
| 1425015 | | | | | CA | |
| AD- | asAfsaacUfgUfUfuacaUfaAfgauccsusa | 1336 | gsgsaucuUfaUfGfUfaaacaguuuuL96 | 1876 | UAGGAUCUUAUGUAAACAGUU | 2416 |
| 1425020 | | | | | UU | |
| AD- | asAfsucaGfaAfAfcaaaAfaCfuguuusasc | 1337 | asasacagUfuUfUfUfguuucugauuL96 | 1877 | GUAAACAGUUUUUGUUUCUGA | 2417 |
| 1425031 | | | | | UA | |
| AD- | asUfsuacUfaUfCfagaaAfcAfaaaacsusg | 1338 | gsusuuuuGfuUfUfCfugauaguaauL96 | 1878 | CAGUUUUUGUUUCUGAUAGUA | 2418 |
| 1425036 | | | | | AU | |
| AD- | asGfsuccAfuUfAfcuauCfaGfaaacasasa | 1339 | usgsuuucUfgAfUfAfguaauggacuL96 | 1879 | UUUGUUUCUGAUAGUAAUGGA | 2419 |
| 1425041 | | | | | CU | |
| AD- | asAfsuaaAfgUfCfcauuAfcUfaucagsasa | 1340 | csusgauaGfuAfAfUfggacuuuauuL96 | 1880 | UUCUGAUAGUAAUGGACUUUA | 2420 |
| 1425046 | | | | | UU | |
| AD- | asAfsaguUfaGfAfauaaAfgUfccauusasc | 1341 | asasuggaCfuUfUfAfuucuaacuuuL96 | 1881 | GUAAUGGACUUUAUUCUAACU | 2421 |
| 1425054 | | | | | UG | |
| AD- | asUfsgauCfuCfAfaguuAfgAfauaaasgsu | 1342 | ususuauuCfuAfAfCfuugagaucauL96 | 1882 | ACUUUAUUCUAACUUGAGAUCA | 2422 |
| 1425061 | | | | | G | |
| AD- | asGfsccaCfuGfAfucucAfaGfuuagasasu | 1343 | uscsuaacUfuGfAfGfaucaguggcuL96 | 1883 | AUUCUAACUUGAGAUCAGUGGC | 2423 |
| 1425066 | | | | | G | |
| AD- | asUfsuugAfuCfCfgccaCfuGfaucucsasa | 1344 | gsasgaucAfgUfGfGfcggaucaaauL96 | 1884 | UUGAGAUCAGUGGCGGAUCAA | 2424 |
| 1425074 | | | | | AA | |
| AD- | asUfsaggUfuUfUfgaucCfgCfcacugsasu | 1345 | csasguggCfgGfAfUfcaaaaccuauL96 | 1885 | AUCAGUGGCGGAUCAAAACCUA | 2425 |
| 1425079 | | | | | C | |
| AD- | asAfsaucUfuGfUfagguUfuUfgauccsgsc | 1346 | gsgsaucaAfaAfCfCfuacaagauuuL96 | 1886 | GCGGAUCAAAACCUACAAGAUU | 2426 |
| 1425086 | | | | | C | |
| AD- | asAfsguuGfaAfUfcuugUfaGfguuuusgsa | 1347 | asasaaccUfaCfAfAfgauucaacuuL96 | 1887 | UCAAAACCUACAAGAUUCAACU | 2427 |
| 1425091 | | | | | G | |
| AD- | asUfsuuuCfaGfUfugaaUfcUfuguagsgsu | 1348 | csusacaaGfaUfUfCfaacugaaaauL96 | 1888 | ACCUACAAGAUUCAACUGAAAA | 2428 |
| 1425096 | | | | | G | |
| AD- | asCfscaaCfuUfUfucagUfuGfaaucususg | 1349 | asgsauucAfaCfUfGfaaaaguugguL96 | 1889 | CAAGAUUCAACUGAAAAGUUGG | 2429 |
| 1425101 | | | | | C | |
| AD- | asUfsaacUfgCfCfaacuUfuUfcaguusgsa | 1350 | asascugaAfaAfGfUfuggcaguuauL96 | 1890 | UCAACUGAAAAGUUGGCAGUUA | 2430 |
| 1425107 | | | | | U | |
| AD- | asAfsaacCfaUfAfacugCfcAfacuuususc | 1351 | asasaguuGfgCfAfGfuuaugguuuuL96 | 1891 | GAAAAGUUGGCAGUUAUGGUU | 2431 |
| 1425113 | | | | | UU | |
| AD- | asAfsaagAfaAfAfccauAfaCfugccasasc | 1352 | usgsgcagUfuAfUfGfguuuucuuuuL96 | 1892 | GUUGGCAGUUAUGGUUUUCUU | 2432 |
| 1425118 | | | | | UC | |
| AD- | asAfsgauGfaAfAfgaaaAfcCfauaacsusg | 1353 | gsusuaugGfuUfUfUfcuuucaucuuL96 | 1893 | CAGUUAUGGUUUUCUUUCAUC | 2433 |
| 1425123 | | | | | UG | |
| AD- | asUfsgacAfcAfUfcagaUfgAfaagaasasa | 1354 | ususcuuuCfaUfCfUfgaugugucauL96 | 1894 | UUUUCUUUCAUCUGAUGUGUC | 2434 |
| 1425132 | | | | | AG | |
| AD- | asAfsgauAfcUfGfacacAfuCfagaugsasa | 1355 | csasucugAfuGfUfGfucaguaucuuL96 | 1895 | UUCAUCUGAUGUGUCAGUAUC | 2435 |
| 1425138 | | | | | UG | |
| AD- | asAfsucaAfcAfGfauacUfgAfcacauscsa | 1356 | asusguguCfaGfUfAfucuguugauuL96 | 1896 | UGAUGUGUCAGUAUCUGUUGA | 2436 |
| 1425144 | | | | | UU | |
| AD- | asAfsagcAfaAfUfcaacAfgAfuacugsasc | 1357 | csasguauCfuGfUfUfgauuugcuuuL96 | 1897 | GUCAGUAUCUGUUGAUUUGCU | 2437 |
| 1425150 | | | | | UU | |
| AD- | asAfsaacUfaCfAfaagcAfaAfucaacsasg | 1358 | gsusugauUfuGfCfUfuuguaguuuuL96 | 1898 | CUGUUGAUUUGCUUUGUAGUU | 2438 |
| 1425158 | | | | | UG | |
| AD- | asAfsuguCfaAfCfaaacUfaCfaaagcsasa | 1359 | gscsuuugUfaGfUfUfuguugacauuL96 | 1899 | UUGCUUUGUAGUUUGUUGACA | 2439 |
| 1425165 | | | | | UC | |
| AD- | asUfsuaaGfaUfGfucaaCfaAfacuacsasa | 1360 | gsusaguuUfgUfUfGfacaucuuaauL96 | 1900 | UUGUAGUUUGUUGACAUCUUA | 2440 |
| 1425170 | | | | | AG | |
| AD- | asAfsaauCfuUfAfagauGfuCfaacaasasc | 1361 | ususguugAfcAfUfCfuuaagauuuuL96 | 1901 | GUUUGUUGACAUCUUAAGAUU | 2441 |
| 1425175 | | | | | UG | |
| AD- | asAfscauCfaAfAfucuuAfaGfaugucsasa | 1362 | gsascaucUfuAfAfGfauuugauguuL96 | 1902 | UUGACAUCUUAAGAUUUGAUG | 2442 |
| 1425180 | | | | | UG | |
| AD- | asAfscuuUfcAfCfaucaAfaUfcuuaasgsa | 1363 | ususaagaUfuUfGfAfugugaaaguuL96 | 1903 | UCUUAAGAUUUGAUGUGAAAG | 2443 |
| 1425186 | | | | | UU | |
| AD- | asUfscuaAfaAfCfuuucAfcAfucaaasusc | 1364 | ususugauGfuGfAfAfaguuuuagauL96 | 1904 | GAUUUGAUGUGAAAGUUUUAG | 2444 |
| 1425192 | | | | | AU | |
| AD- | VPusAfscuaGfaGfGfcaucAfuCfgccauscs | 1365 | asusggc(Ghd)AfuGfAfUfgccucuagsus | 1905 | CGAUGGCGAUGAUGCCUCUAGU | 2445 |
| 1425210 | g | | a | | C | |
| AD- | VPusAfsugcAfgGfAfcuagAfgGfcaucasus | 1366 | usgsaug(Chd)CfuCfUfAfguccugcasus | 1906 | GAUGAUGCCUCUAGUCCUGCAU | 2446 |
| 1425217 | c | | a | | C | |
| AD- | VPusGfsgauGfaUfGfcaggAfcUfagaggsc | 1367 | cscsucu(Ahd)GfuCfCfUfgcaucaucscs | 1907 | UGCCUCUAGUCCUGCAUCAUCC | 2447 |
| 1425222 | sa | | a | | A | |
| AD- | VPusCfsgcuCfuGfGfaugaUfgCfaggacsus | 1368 | gsusccu(Ghd)CfaUfCfAfuccagagcsgs | 1908 | UAGUCCUGCAUCAUCCAGAGCG | 2448 |
| 1425228 | a | | a | | G | |
| AD- | VPusUfsccuCfcAfUfcucgCfaGfuccggsas | 1369 | cscsgga(Chd)UfgCfGfAfgauggaggsas | 1909 | GUCCGGACUGCGAGAUGGAGGA | 2449 |
| 1425243 | c | | a | | G | |
| AD- | VPusAfscagAfuAfAfgccuGfcCfgggugsgs | 1370 | csasccc(Ghd)GfcAfGfGfcuuaucugsus | 1910 | GCCACCCGGCAGGCUUAUCUGU | 2450 |
| 1425251 | c | | a | | C | |
| AD- | VPusCfscaaGfaCfAfgauaAfgCfcugccsgs | 1371 | gsgscag(Ghd)CfuUfAfUfcugucuugsgs | 1911 | CCGGCAGGCUUAUCUGUCUUGG | 2451 |
| 1425256 | g | | a | | G | |
| AD- | VPusAfsaaaGfaGfGfcccaAfgAfcagausas | 1372 | asuscug(Uhd)CfuUfGfGfgccucuuusu | 1912 | UUAUCUGUCUUGGGCCUCUUU | 2452 |
| 1425265 | a | | sa | | UG | |
| AD- | VPusGfsugaCfaAfAfagagGfcCfcaagascs | 1373 | uscsuug(Ghd)GfcCfUfCfuuuugucascs | 1913 | UGUCUUGGGCCUCUUUUGUCA | 2453 |
| 1425270 | a | | a | | CA | |
| AD- | VPusAfsauaUfgUfGfacaaAfaGfaggccscs | 1374 | gsgsccu(Chd)UfuUfUfGfucacauausus | 1914 | UGGGCCUCUUUUGUCACAUAU | 2454 |
| 1425275 | a | | a | | UG | |
| AD- | VPusAfsugaGfcAfAfuaugUfgAfcaaaasg | 1375 | ususuug(Uhd)CfaCfAfUfauugcucasu | 1915 | UCUUUUGUCACAUAUUGCUCA | 2455 |
| 1425281 | sa | | sa | | UC | |
| AD- | VPusUfscacAfgAfUfgagcAfaUfaugugsa | 1376 | csascau(Ahd)UfuGfCfUfcaucugugsas | 1916 | GUCACAUAUUGCUCAUCUGUGA | 2456 |
| 1425287 | sc | | a | | G | |
| AD- | VPusUfscagCfuCfAfcagaUfgAfgcaausas | 1377 | asusugc(Uhd)CfaUfCfUfgugagcugsas | 1917 | AUAUUGCUCAUCUGUGAGCUG | 2457 |
| 1425292 | u | | a | | AG | |
| AD- | VPusAfsgggCfcUfCfagcuCfaCfagaugsas | 1378 | csasucu(Ghd)UfgAfGfCfugaggcccsus | 1918 | CUCAUCUGUGAGCUGAGGCCCU | 2458 |
| 1425298 | g | | a | | G | |
| AD- | VPusAfsuacUfcAfGfugagUfcAfgggccsus | 1379 | gsgsccc(Uhd)GfaCfUfCfacugaguasus | 1919 | GAGGCCCUGACUCACUGAGUAU | 2459 |
| 1425312 | c | | a | | U | |
| AD- | VPusCfsaaaAfaUfAfcucaGfuGfagucasg | 1380 | usgsacu(Chd)AfcUfGfAfguauuuuusg | 1920 | CCUGACUCACUGAGUAUUUUU | 2460 |
| 1425317 | sg | | sa | | GG | |
| AD- | VPusAfsaugUfcUfCfcuucUfuCfugcucscs | 1381 | gsasgca(Ghd)AfaGfAfAfggagacausus | 1921 | GGGAGCAGAAGAAGGAGACAUU | 2461 |
| 1425321 | c | | a | | U | |
| AD- | VPusAfsgagAfaAfUfgucuCfcUfucuucsu | 1382 | gsasaga(Ahd)GfgAfGfAfcauuucucsus | 1922 | CAGAAGAAGGAGACAUUUCUCU | 2462 |
| 1425326 | sg | | a | | C | |
| AD- | VPusUfsuucGfgAfGfagaaAfuGfucuccsu | 1383 | gsgsaga(Chd)AfuUfUfCfucuccgaasas | 1923 | AAGGAGACAUUUCUCUCCGAAA | 2463 |
| 1425332 | su | | a | | A | |
| AD- | VPusAfsguuCfaUfUfuucgGfaGfagaaasu | 1384 | ususucu(Chd)UfcCfGfAfaaaugaacsus | 1924 | CAUUUCUCUCCGAAAAUGAACU | 2464 |
| 1425339 | sg | | a | | C | |
| AD- | VPusUfsguuGfaGfUfucauUfuUfcggagsa | 1385 | csusccg(Ahd)AfaAfUfGfaacucaacsas | 1925 | CUCUCCGAAAAUGAACUCAACA | 2465 |
| 1425344 | sg | | a | | G | |
| AD- | VPusUfsggcCfuGfUfugagUfuCfauuuusc | 1386 | asasaau(Ghd)AfaCfUfCfaacaggccsas | 1926 | CGAAAAUGAACUCAACAGGCCA | 2466 |
| 1425349 | sg | | a | | C | |
| AD- | VPusGfsaagGfuGfGfccugUfuGfaguucsa | 1387 | gsasacu(Chd)AfaCfAfGfgccaccuuscsa | 1927 | AUGAACUCAACAGGCCACCUUC | 2467 |
| 1425354 | su | | | | A | |
| AD- | VPusGfscauCfcUfGfaaggUfgGfccugusu | 1388 | ascsagg(Chd)CfaCfCfUfucaggaugscsa | 1928 | CAACAGGCCACCUUCAGGAUGC | 2468 |
| 1425361 | sg | | | | C | |
| AD- | VPusAfsggcAfcAfUfggagCfgAfgguggscs | 1389 | cscsacc(Uhd)CfgCfUfCfcaugugccsusa | 1929 | UGCCACCUCGCUCCAUGUGCCU | 2469 |
| 1425368 | a | | | | C | |
| AD- | VPusGfsaguGfaGfGfcacaUfgGfagcgasg | 1390 | uscsgcu(Chd)CfaUfGfUfgccucacuscs | 1930 | CCUCGCUCCAUGUGCCUCACUC | 2470 |
| 1425373 | sg | | a | | A | |
| AD- | VPusUfsuccUfgUfGfagugAfgGfcacausg | 1391 | asusgug(Chd)CfuCfAfCfucacaggasas | 1931 | CCAUGUGCCUCACUCACAGGAA | 2471 |
| 1425380 | sg | | a | | G | |
| AD- | VPusUfsuucCfuUfCfcuguGfaGfugaggsc | 1392 | cscsuca(Chd)UfcAfCfAfggaaggaasasa | 1932 | UGCCUCACUCACAGGAAGGAAA | 2472 |
| 1425385 | sa | | | | C | |
| AD- | VPusAfsgguGfcUfGfuuucCfuUfccugusg | 1393 | ascsagg(Ahd)AfgGfAfAfacagcaccsus | 1933 | UCACAGGAAGGAAACAGCACCU | 2473 |
| 1425393 | sa | | a | | C | |
| AD- | VPusGfsagaGfaGfGfugcuGfuUfuccuusc | 1394 | asasgga(Ahd)AfcAfGfCfaccucucuscs | 1934 | GGAAGGAAACAGCACCUCUCUC | 2474 |
| 1425398 | sc | | a | | C | |
| AD- | VPusCfsugaAfgAfCfccucCfuGfgagagsas | 1395 | csuscuc(Chd)AfgGfAfGfggucuucasgs | 1935 | CUCUCUCCAGGAGGGUCUUCAG | 2475 |
| 1425413 | g | | a | | G | |
| AD- | VPusAfsgauCfcUfGfaagaCfcCfuccugsgs | 1396 | csasgga(Ghd)GfgUfCfUfucaggaucsus | 1936 | UCCAGGAGGGUCUUCAGGAUCU | 2476 |
| 1425418 | a | | a | | C | |
| AD- | VPusUfsggaUfgAfGfauccUfgAfagaccscs | 1397 | gsgsucu(Uhd)CfaGfGfAfucucauccsas | 1937 | AGGGUCUUCAGGAUCUCAUCCA | 2477 |
| 1425424 | u | | a | | C | |
| AD- | VPusCfsuguGfuGfGfaugaGfaUfccugasa | 1398 | uscsagg(Ahd)UfcUfCfAfuccacacasgs | 1938 | CUUCAGGAUCUCAUCCACACAG | 2478 |
| 1425429 | sg | | a | | C | |
| AD- | VPusCfsaagGfuGfGfcuguGfuGfgaugasg | 1399 | uscsauc(Chd)AfcAfCfAfgccaccuusgsa | 1939 | UCUCAUCCACACAGCCACCUUG | 2479 |
| 1425437 | sa | | | | G | |
| AD- | VPusGfsucaCfcAfAfggugGfcUfgugugsg | 1400 | csascac(Ahd)GfcCfAfCfcuuggugascsa | 1940 | UCCACACAGCCACCUUGGUGAC | 2480 |
| 1425442 | sa | | | | C | |
| AD- | VPusUfsacaGfgUfCfaccaAfgGfuggcusgs | 1401 | asgscca(Chd)CfuUfGfGfugaccugusas | 1941 | ACAGCCACCUUGGUGACCUGUA | 2481 |
| 1425447 | u | | a | | C | |
| AD- | VPusAfsaaaGfuAfCfagguCfaCfcaaggsus | 1402 | cscsuug(Ghd)UfgAfCfCfuguacuuusus | 1942 | CACCUUGGUGACCUGUACUUUU | 2482 |
| 1425452 | g | | a | | C | |
| AD- | VPusAfsguaGfaAfAfaguaCfaGfgucacscs | 1403 | gsusgac(Chd)UfgUfAfCfuuuucuacsus | 1943 | UGGUGACCUGUACUUUUCUAC | 2483 |
| 1425457 | a | | a | | UG | |
| AD- | VPusAfsugaCfcGfCfcaguAfgAfaaagusas | 1404 | ascsuuu(Uhd)CfuAfCfUfggcggucasus | 1944 | GUACUUUUCUACUGGCGGUCA | 2484 |
| 1425466 | c | | a | | UC | |
| AD- | VPusAfsgaaGfaUfGfaccgCfcAfguagasas | 1405 | uscsuac(Uhd)GfgCfGfGfucaucuucsus | 1945 | UUUCUACUGGCGGUCAUCUUC | 2485 |
| 1425471 | a | | a | | UG | |
| AD- | VPusAfsaccCfaGfGfcagaAfgAfugaccsgs | 1406 | gsgsuca(Uhd)CfuUfCfUfgccugggusus | 1946 | GCGGUCAUCUUCUGCCUGGGU | 2486 |
| 1425480 | c | | a | | UC | |
| AD- | VPusCfscauAfgGfAfacccAfgGfcagaasgs | 1407 | ususcug(Chd)CfuGfGfGfuuccuaugsgs | 1947 | UCUUCUGCCUGGGUUCCUAUG | 2487 |
| 1425487 | a | | a | | GC | |
| AD- | VPusAfsguuGfcCfAfuaggAfaCfccaggscs | 1408 | cscsugg(Ghd)UfuCfCfUfauggcaacsus | 1948 | UGCCUGGGUUCCUAUGGCAACU | 2488 |
| 1425492 | a | | a | | U | |
| AD- | VPusAfsaugAfaGfUfugccAfuAfggaacscs | 1409 | gsusucc(Uhd)AfuGfGfCfaacuucausus | 1949 | GGGUUCCUAUGGCAACUUCAUU | 2489 |
| 1425497 | c | | a | | G | |
| AD- | VPusAfsagaCfaAfUfgaagUfuGfccauasg | 1410 | usasugg(Chd)AfaCfUfUfcauugucusus | 1950 | CCUAUGGCAACUUCAUUGUCUU | 2490 |
| 1425502 | sg | | a | | C | |
| AD- | VPusAfscaaGfaAfGfacaaUfgAfaguugsc | 1411 | csasacu(Uhd)CfaUfUfGfucuucuugsu | 1951 | GGCAACUUCAUUGUCUUCUUG | 2491 |
| 1425507 | sc | | sa | | UC | |
| AD- | VPusGfsaagGfaCfAfagaaGfaCfaaugasa | 1412 | uscsauu(Ghd)UfcUfUfCfuuguccuusc | 1952 | CUUCAUUGUCUUCUUGUCCUUC | 2492 |
| 1425512 | sg | | sa | | U | |
| AD- | VPusUfscgaAfgAfAfggacAfaGfaagacsas | 1413 | gsuscuu(Chd)UfuGfUfCfcuucuucgsas | 1953 | UUGUCUUCUUGUCCUUCUUCG | 2493 |
| 1425515 | a | | a | | AU | |
| AD- | VPusCfsuggAfuCfGfaagaAfgGfacaagsas | 1414 | csusugu(Chd)CfuUfCfUfucgauccasgs | 1954 | UUCUUGUCCUUCUUCGAUCCAG | 2494 |
| 1425520 | a | | a | | C | |
| AD- | VPusGfsaagGfcUfGfgaucGfaAfgaaggsa | 1415 | cscsuuc(Uhd)UfcGfAfUfccagccuuscs | 1955 | GUCCUUCUUCGAUCCAGCCUUC | 2495 |
| 1425525 | sc | | a | | A | |
| AD- | VPusAfsauuUfcCfUfgaagGfcUfggaucsg | 1416 | gsasucc(Ahd)GfcCfUfUfcaggaaausus | 1956 | UCGAUCCAGCCUUCAGGAAAUU | 2496 |
| 1425533 | sa | | a | | C | |
| AD- | VPusUfsucuGfaAfUfuuccUfgAfaggcusg | 1417 | asgsccu(Uhd)CfaGfGfAfaauucagasas | 1957 | CCAGCCUUCAGGAAAUUCAGAA | 2497 |
| 1425538 | sg | | a | | C | |
| AD- | VPusGfsuugGfuUfCfugaaUfuUfccugasa | 1418 | uscsagg(Ahd)AfaUfUfCfagaaccaascs | 1958 | CUUCAGGAAAUUCAGAACCAAC | 2498 |
| 1425543 | sg | | a | | U | |
| AD- | VPusAfsaucAfaAfGfuuggUfuCfugaausu | 1419 | asusuca(Ghd)AfaCfCfAfacuuugausus | 1959 | AAAUUCAGAACCAACUUUGAUU | 2499 |
| 1425550 | su | | a | | U | |
| AD- | VPusUfscauGfaAfAfucaaAfgUfugguusc | 1420 | asascca(Ahd)CfuUfUfGfauuucaugsas | 1960 | AGAACCAACUUUGAUUUCAUGA | 2500 |
| 1425556 | su | | a | | U | |
| AD- | VPusUfsucaGfgAfUfcaugAfaAfucaaasg | 1421 | ususuga(Uhd)UfuCfAfUfgauccugasa | 1961 | ACUUUGAUUUCAUGAUCCUGAA | 2501 |
| 1425563 | su | | sa | | C | |
| AD- | VPusGfsacaGfgUfUfcaggAfuCfaugaasa | 1422 | ususcau(Ghd)AfuCfCfUfgaaccuguscs | 1962 | AUUUCAUGAUCCUGAACCUGUC | 2502 |
| 1425569 | su | | a | | C | |
| AD- | VPusAfsgaaGfgAfCfagguUfcAfggaucsas | 1423 | gsasucc(Uhd)GfaAfCfCfuguccuucsus | 1963 | AUGAUCCUGAACCUGUCCUUCU | 2503 |
| 1425574 | u | | a | | G | |
| AD- | VPusGfsgucAfcAfGfaaggAfcAfgguucsas | 1424 | gsasacc(Uhd)GfuCfCfUfucugugacscs | 1964 | CUGAACCUGUCCUUCUGUGACC | 2504 |
| 1425580 | g | | a | | U | |
| AD- | VPusGfsaagAfgGfUfcacaGfaAfggacasgs | 1425 | usgsucc(Uhd)UfcUfGfUfgaccucuuscs | 1965 | CCUGUCCUUCUGUGACCUCUUC | 2505 |
| 1425585 | g | | a | | A | |
| AD- | VPusCfsaaaUfgAfAfgaggUfcAfcagaasgs | 1426 | ususcug(Uhd)GfaCfCfUfcuucauuusg | 1966 | CCUUCUGUGACCUCUUCAUUUG | 2506 |
| 1425590 | g | | sa | | U | |
| AD- | VPusAfscucCfaCfAfaaugAfaGfaggucsas | 1427 | gsasccu(Chd)UfuCfAfUfuuguggagsus | 1967 | GUGACCUCUUCAUUUGUGGAG | 2507 |
| 1425596 | c | | a | | UG | |
| AD- | VPusCfsuguCfaCfUfccacAfaAfugaagsas | 1428 | csusuca(Uhd)UfuGfUfGfgagugacasg | 1968 | CUCUUCAUUUGUGGAGUGACA | 2508 |
| 1425601 | g | | sa | | GC | |
| AD- | VPusAfsuaaCfaCfAfaaggUfgAfacaugsgs | 1429 | csasugu(Uhd)CfaCfCfUfuuguguuasu | 1969 | CCCAUGUUCACCUUUGUGUUAU | 2509 |
| 1425604 | g | | sa | | U | |
| AD- | VPusGfsaagAfaUfAfacacAfaAfggugasas | 1430 | uscsacc(Uhd)UfuGfUfGfuuauucuusc | 1970 | GUUCACCUUUGUGUUAUUCUU | 2510 |
| 1425609 | c | | sa | | CA | |
| AD- | VPusGfsagcUfgAfAfgaauAfaCfacaaasgs | 1431 | ususugu(Ghd)UfuAfUfUfcuucagcusc | 1971 | CCUUUGUGUUAUUCUUCAGCU | 2511 |
| 1425614 | g | | sa | | CA | |
| AD- | VPusUfsggcUfgAfGfcugaAfgAfauaacsas | 1432 | gsusuau(Uhd)CfuUfCfAfgcucagccsas | 1972 | GUGUUAUUCUUCAGCUCAGCCA | 2512 |
| 1425619 | c | | a | | G | |
| AD- | VPusGfsgauAfcUfAfcuggCfuGfagcugsa | 1433 | csasgcu(Chd)AfgCfCfAfguaguaucscs | 1973 | UUCAGCUCAGCCAGUAGUAUCC | 2513 |
| 1425628 | sa | | a | | C | |
| AD- | VPusAfsuccGfgGfAfuacuAfcUfggcugsas | 1434 | csasgcc(Ahd)GfuAfGfUfaucccggasus | 1974 | CUCAGCCAGUAGUAUCCCGGAU | 2514 |
| 1425633 | g | | a | | G | |
| AD- | VPusAfsgaaAfgCfAfuccgGfgAfuacuascs | 1435 | usasgua(Uhd)CfcCfGfGfaugcuuucsus | 1975 | AGUAGUAUCCCGGAUGCUUUCU | 2515 |
| 1425640 | u | | a | | G | |
| AD- | VPusGfsaagCfaGfAfaagcAfuCfcgggasus | 1436 | uscsccg(Ghd)AfuGfCfUfuucugcuuscs | 1976 | UAUCCCGGAUGCUUUCUGCUUC | 2516 |
| 1425645 | a | | a | | A | |
| AD- | VPusAfsaagUfgAfAfgcagAfaAfgcaucscs | 1437 | gsasugc(Uhd)UfuCfUfGfcuucacuusu | 1977 | CGGAUGCUUUCUGCUUCACUU | 2517 |
| 1425650 | g | | sa | | UC | |
| AD- | VPusGfsaugGfaAfAfgugaAfgCfagaaasg | 1438 | ususucu(Ghd)CfuUfCfAfcuuuccauscs | 1978 | GCUUUCUGCUUCACUUUCCAUC | 2518 |
| 1425655 | sc | | a | | U | |
| AD- | VPusAfsacuGfgUfGfagauGfgAfaagugsa | 1439 | csascuu(Uhd)CfcAfUfCfucaccagusus | 1979 | UUCACUUUCCAUCUCACCAGUU | 2519 |
| 1425664 | sa | | a | | C | |
| AD- | VPusAfsgccUfgAfAfcuggUfgAfgauggsas | 1440 | cscsauc(Uhd)CfaCfCfAfguucaggcsus | 1980 | UUCCAUCUCACCAGUUCAGGCU | 2520 |
| 1425670 | a | | a | | U | |
| AD- | VPusGfsaugAfaGfCfcugaAfcUfggugasg | 1441 | uscsacc(Ahd)GfuUfCfAfggcuucauscs | 1981 | UCUCACCAGUUCAGGCUUCAUC | 2521 |
| 1425675 | sa | | a | | A | |
| AD- | VPusAfsugaUfgAfUfgaagCfcUfgaacusg | 1442 | asgsuuc(Ahd)GfgCfUfUfcaucaucasus | 1982 | CCAGUUCAGGCUUCAUCAUCAU | 2522 |
| 1425680 | sg | | a | | G | |
| AD- | VPusGfsagaCfaUfGfaugaUfgAfagccusg | 1443 | asgsgcu(Uhd)CfaUfCfAfucaugucuscs | 1983 | UCAGGCUUCAUCAUCAUGUCUC | 2523 |
| 1425685 | sa | | a | | U | |
| AD- | VPusCfsuucAfgAfGfacauGfaUfgaugasa | 1444 | uscsauc(Ahd)UfcAfUfGfucucugaasgs | 1984 | CUUCAUCAUCAUGUCUCUGAAG | 2524 |
| 1425690 | sg | | a | | A | |
| AD- | VPusAfscugUfcUfUfcagaGfaCfaugausg | 1445 | asuscau(Ghd)UfcUfCfUfgaagacagsus | 1985 | UCAUCAUGUCUCUGAAGACAGU | 2525 |
| 1425695 | sa | | a | | G | |
| AD- | VPusAfscugCfcAfCfugucUfuCfagagascs | 1446 | uscsucu(Ghd)AfaGfAfCfaguggcagsus | 1986 | UGUCUCUGAAGACAGUGGCAG | 2526 |
| 1425701 | a | | a | | UG | |
| AD- | VPusGfscagGfgCfGfaucaCfuGfccacusgs | 1447 | asgsugg(Chd)AfgUfGfAfucgcccugscs | 1987 | ACAGUGGCAGUGAUCGCCCUGC | 2527 |
| 1425712 | u | | a | | A | |
| AD- | VPusAfsacaCfcAfUfccggAfgCfcggugscs | 1448 | csasccg(Ghd)CfuCfCfGfgauggugusus | 1988 | UGCACCGGCUCCGGAUGGUGUU | 2528 |
| 1425727 | a | | a | | G | |
| AD- | VPusAfsggcCfgUfGfcgauUfaGfgcugusu | 1449 | ascsagc(Chd)UfaAfUfCfgcacggccsusa | 1989 | AAACAGCCUAAUCGCACGGCCU | 2529 |
| 1425735 | su | | | | C | |
| AD- | VPusAfsaagGfaGfGfccguGfcGfauuagsg | 1450 | csusaau(Chd)GfcAfCfGfgccuccuusus | 1990 | GCCUAAUCGCACGGCCUCCUUU | 2530 |
| 1425740 | sc | | a | | C | |
| AD- | VPusCfsaggGfaAfAfggagGfcCfgugcgsas | 1451 | csgscac(Ghd)GfcCfUfCfcuuucccusgs | 1991 | AUCGCACGGCCUCCUUUCCCUG | 2531 |
| 1425745 | u | | a | | C | |
| AD- | VPusUfsacgGfuGfCfagggAfaAfggaggscs | 1452 | cscsucc(Uhd)UfuCfCfCfugcaccgusasa | 1992 | GGCCUCCUUUCCCUGCACCGUA | 2532 |
| 1425752 | c | | | | C | |
| AD- | VPusAfsggaGfuAfCfggugCfaGfggaaasgs | 1453 | ususucc(Chd)UfgCfAfCfcguacuccsus | 1993 | CCUUUCCCUGCACCGUACUCCU | 2533 |
| 1425757 | g | | a | | C | |
| AD- | VPusAfsgggUfgAfGfgaguAfcGfgugcasg | 1454 | usgscac(Chd)GfuAfCfUfccucacccsusa | 1994 | CCUGCACCGUACUCCUCACCCUG | 2534 |
| 1425763 | sg | | | | | |
| AD- | VPusAfsgagAfaGfCfagggUfgAfggagusas | 1455 | ascsucc(Uhd)CfaCfCfCfugcuucucsus | 1995 | GUACUCCUCACCCUGCUUCUCU | 2535 |
| 1425771 | c | | a | | G | |
| AD- | VPusGfsuggCfcCfAfgagaAfgCfagggusgs | 1456 | ascsccu(Ghd)CfuUfCfUfcugggccascs | 1996 | UCACCCUGCUUCUCUGGGCCAC | 2536 |
| 1425778 | a | | a | | C | |
| AD- | VPusAfsaacUfgGfUfggccCfaGfagaagscs | 1457 | csusucu(Chd)UfgGfGfCfcaccaguusus | 1997 | UGCUUCUCUGGGCCACCAGUUU | 2537 |
| 1425784 | a | | a | | C | |
| AD- | VPusGfsgguGfaAfAfcuggUfgGfcccagsas | 1458 | csusggg(Chd)CfaCfCfAfguuucaccscsa | 1998 | CUCUGGGCCACCAGUUUCACCC | 2538 |
| 1425789 | g | | | | U | |
| AD- | VPusUfsggcAfaGfGfgugaAfaCfuggugsg | 1459 | csascca(Ghd)UfuUfCfAfcccuugccsas | 1999 | GCCACCAGUUUCACCCUUGCCA | 2539 |
| 1425795 | sc | | a | | C | |
| AD- | VPusAfsgccAfaGfGfuggcAfaGfggugasas | 1460 | uscsacc(Chd)UfuGfCfCfaccuuggcsus | 2000 | UUUCACCCUUGCCACCUUGGCU | 2540 |
| 1425803 | a | | a | | A | |
| AD- | VPusUfsucaAfgGfUfagccAfaGfguggcsas | 1461 | gscscac(Chd)UfuGfGfCfuaccuugasas | 2001 | UUGCCACCUUGGCUACCUUGAA | 2541 |
| 1425811 | a | | a | | A | |
| AD- | VPusUfsgguUfuUfCfaaggUfaGfccaagsg | 1462 | csusugg(Chd)UfaCfCfUfugaaaaccsas | 2002 | ACCUUGGCUACCUUGAAAACCA | 2542 |
| 1425816 | su | | a | | G | |
| AD- | VPusAfscuuGfcUfGfguuuUfcAfagguasg | 1463 | usasccu(Uhd)GfaAfAfAfccagcaagsus | 2003 | GCUACCUUGAAAACCAGCAAGU | 2543 |
| 1425822 | sc | | a | | C | |
| AD- | VPusAfsgagGfuGfGfgacuUfgCfugguusu | 1464 | asascca(Ghd)CfaAfGfUfcccaccucsusa | 2004 | AAAACCAGCAAGUCCCACCUCUG | 2544 |
| 1425831 | su | | | | | |
| AD- | VPusGfsgaaGfaCfAfgaggUfgGfgacuusg | 1465 | asasguc(Chd)CfaCfCfUfcugucuucscs | 2005 | GCAAGUCCCACCUCUGUCUUCC | 2545 |
| 1425838 | sc | | a | | C | |
| AD- | VPusGfsacaUfgGfGfaagaCfaGfaggugsg | 1466 | csasccu(Chd)UfgUfCfUfucccauguscs | 2006 | CCCACCUCUGUCUUCCCAUGUC | 2546 |
| 1425844 | sg | | a | | C | |
| AD- | VPusGfsacuGfgAfCfauggGfaAfgacagsas | 1467 | csusguc(Uhd)UfcCfCfAfuguccaguscs | 2007 | CUCUGUCUUCCCAUGUCCAGUC | 2547 |
| 1425849 | g | | a | | U | |
| AD- | VPusAfsaucAfgAfCfuggaCfaUfgggaasgs | 1468 | ususccc(Ahd)UfgUfCfCfagucugausus | 2008 | UCUUCCCAUGUCCAGUCUGAUU | 2548 |
| 1425854 | a | | a | | G | |
| AD- | VPusUfsuuuCfcAfGfcaauCfaGfacuggsa | 1469 | cscsagu(Chd)UfgAfUfUfgcuggaaasas | 2009 | GUCCAGUCUGAUUGCUGGAAAA | 2549 |
| 1425863 | sc | | a | | G | |
| AD- | VPusUfsuucCfcUfUfuuccAfgCfaaucasgs | 1470 | usgsauu(Ghd)CfuGfGfAfaaagggaasa | 2010 | UCUGAUUGCUGGAAAAGGGAA | 2550 |
| 1425869 | a | | sa | | AG | |
| AD- | VPusAfsaugGfcUfUfucccUfuUfuccagsc | 1471 | csusgga(Ahd)AfaGfGfGfaaagccausus | 2011 | UGCUGGAAAAGGGAAAGCCAUU | 2551 |
| 1425875 | sa | | a | | U | |
| AD- | VPusAfsgacAfaAfAfuggcUfuUfcccuusus | 1472 | asasggg(Ahd)AfaGfCfCfauuuugucsus | 2012 | AAAAGGGAAAGCCAUUUUGUCU | 2552 |
| 1425881 | u | | a | | C | |
| AD- | VPusCfsauaGfaGfAfgacaAfaAfuggcusu | 1473 | asgscca(Uhd)UfuUfGfUfcucucuausgs | 2013 | AAAGCCAUUUUGUCUCUCUAUG | 2553 |
| 1425888 | su | | a | | U | |
| AD- | VPusGfsaccAfcAfUfagagAfgAfcaaaasus | 1474 | ususuug(Uhd)CfuCfUfCfuauguggusc | 2014 | CAUUUUGUCUCUCUAUGUGGU | 2554 |
| 1425893 | g | | sa | | CG | |
| AD- | VPusAfsaguCfgAfCfcacaUfaGfagagascs | 1475 | uscsucu(Chd)UfaUfGfUfggucgacusus | 2015 | UGUCUCUCUAUGUGGUCGACU | 2555 |
| 1425898 | a | | a | | UC | |
| AD- | VPusAfsgaaGfgUfGfaaguCfgAfccacasus | 1476 | usgsugg(Uhd)CfgAfCfUfucaccuucsus | 2016 | UAUGUGGUCGACUUCACCUUCU | 2556 |
| 1425906 | a | | a | | G | |
| AD- | VPusCfsaacAfcAfGfaaggUfgAfagucgsas | 1477 | csgsacu(Uhd)CfaCfCfUfucuguguusgs | 2017 | GUCGACUUCACCUUCUGUGUU | 2557 |
| 1425912 | c | | a | | GC | |
| AD- | VPusAfsccaCfaGfCfaacaCfaGfaaggusgs | 1478 | ascscuu(Chd)UfgUfGfUfugcuguggsu | 2018 | UCACCUUCUGUGUUGCUGUGG | 2558 |
| 1425919 | a | | sa | | UC | |
| AD- | VPusAfsgacAfgAfGfaccaCfaGfcaacascs | 1479 | usgsuug(Chd)UfgUfGfGfucucugucsu | 2019 | UGUGUUGCUGUGGUCUCUGUC | 2559 |
| 1425927 | a | | sa | | UC | |
| AD- | VPusUfsguaAfgAfGfacagAfgAfccacasgs | 1480 | usgsugg(Uhd)CfuCfUfGfucucuuacsas | 2020 | GCUGUGGUCUCUGUCUCUUAC | 2560 |
| 1425933 | c | | a | | AU | |
| AD- | VPusCfsaugAfuGfUfaagaGfaCfagagasc | 1481 | uscsucu(Ghd)UfcUfCfUfuacaucausgs | 2021 | GGUCUCUGUCUCUUACAUCAUG | 2561 |
| 1425938 | sc | | a | | A | |
| AD- | VPusUfsgagCfaAfUfcaugAfuGfuaagasg | 1482 | uscsuua(Chd)AfuCfAfUfgauugcucsas | 2022 | UCUCUUACAUCAUGAUUGCUCA | 2562 |
| 1425946 | sa | | a | | G | |
| AD- | VPusAfsgggUfcUfGfagcaAfuCfaugausg | 1483 | asuscau(Ghd)AfuUfGfCfucagacccsus | 2023 | ACAUCAUGAUUGCUCAGACCCU | 2563 |
| 1425952 | su | | a | | G | |
| AD- | VPusAfsgcgUfuCfUfuccgCfaGfggucusgs | 1484 | asgsacc(Chd)UfgCfGfGfaagaacgcsus | 2024 | UCAGACCCUGCGGAAGAACGCU | 2564 |
| 1425965 | a | | a | | C | |
| AD- | VPusGfsacuUfgAfGfcguuCfuUfccgcasgs | 1485 | usgscgg(Ahd)AfgAfAfCfgcucaaguscs | 2025 | CCUGCGGAAGAACGCUCAAGUC | 2565 |
| 1425971 | g | | a | | A | |
| AD- | VPusUfsuucUfgAfCfuugaGfcGfuucuusc | 1486 | asasgaa(Chd)GfcUfCfAfagucagaasas | 2026 | GGAAGAACGCUCAAGUCAGAAA | 2566 |
| 1425976 | sc | | a | | G | |
| AD- | VPusGfsgcaCfuUfUfcugaCfuUfgagcgsu | 1487 | csgscuc(Ahd)AfgUfCfAfgaaagugcscs | 2027 | AACGCUCAAGUCAGAAAGUGCC | 2567 |
| 1425981 | su | | a | | C | |
| AD- | VPusGfsaagCfaUfCfgacuGfuGfauuacsa | 1488 | gsusaau(Chd)AfcAfGfUfcgaugcuuscs | 2028 | CUGUAAUCACAGUCGAUGCUUC | 2568 |
| 1425984 | sg | | a | | C | |
| AD- | VPusGfsuggUfcUfGfgaagCfaUfcgacusg | 1489 | asgsucg(Ahd)UfgCfUfUfccagaccascs | 2029 | ACAGUCGAUGCUUCCAGACCAC | 2569 |
| 1425992 | su | | a | | A | |
| AD- | VPusAfsaagGfcUfGfugguCfuGfgaagcsa | 1490 | gscsuuc(Chd)AfgAfCfCfacagccuusus | 2030 | AUGCUUCCAGACCACAGCCUUU | 2570 |
| 1425999 | su | | a | | C | |
| AD- | VPusCfscauGfaAfAfggcuGfuGfgucugsg | 1491 | csasgac(Chd)AfcAfGfCfcuuucaugsgs | 2031 | UCCAGACCACAGCCUUUCAUGG | 2571 |
| 1426004 | sa | | a | | G | |
| AD- | VPusAfscacUfgGfAfugggAfuCfuccacscs | 1492 | gsusgga(Ghd)AfuCfCfCfauccagugsus | 2032 | AGGUGGAGAUCCCAUCCAGUGU | 2572 |
| 1426023 | u | | a | | G | |
| AD- | VPusAfsuggCfaCfAfcuggAfuGfggaucsus | 1493 | gsasucc(Chd)AfuCfCfAfgugugccasus | 2033 | GAGAUCCCAUCCAGUGUGCCAU | 2573 |
| 1426028 | c | | a | | G | |
| AD- | VPusGfsuucCfuAfUfacagAfgCfcggcasus | 1494 | usgsccg(Ghd)CfuCfUfGfuauaggaascs | 2034 | CAUGCCGGCUCUGUAUAGGAAC | 2574 |
| 1426047 | g | | a | | C | |
| AD- | VPusUfsucuGfgUfUfccuaUfaCfagagcsc | 1495 | gscsucu(Ghd)UfaUfAfGfgaaccagasas | 2035 | CGGCUCUGUAUAGGAACCAGAA | 2575 |
| 1426052 | sg | | a | | U | |
| AD- | VPusUfsguaAfuUfCfugguUfcCfuauacsa | 1496 | gsusaua(Ghd)GfaAfCfCfagaauuacsas | 2036 | CUGUAUAGGAACCAGAAUUACA | 2576 |
| 1426057 | sg | | a | | A | |
| AD- | VPusGfsuuuGfuUfGfuaauUfcUfgguucs | 1497 | gsasacc(Ahd)GfaAfUfUfacaacaaascs | 2037 | AGGAACCAGAAUUACAACAAAC | 2577 |
| 1426063 | csu | | a | | U | |
| AD- | VPusUfsgcuGfcAfGfuuugUfuGfuaauus | 1498 | asasuua(Chd)AfaCfAfAfacugcagcsas | 2038 | AGAAUUACAACAAACUGCAGCA | 2578 |
| 1426070 | csu | | a | | C | |
| AD- | VPusUfsgaaCfgUfGfcugcAfgUfuuguusg | 1499 | asascaa(Ahd)CfuGfCfAfgcacguucsas | 2039 | ACAACAAACUGCAGCACGUUCA | 2579 |
| 1426076 | su | | a | | G | |
| AD- | VPusCfsgggUfcUfGfaacgUfgCfugcagsus | 1500 | csusgca(Ghd)CfaCfGfUfucagacccsgs | 2040 | AACUGCAGCACGUUCAGACCCG | 2580 |
| 1426082 | u | | a | | U | |
| AD- | VPusUfsaucCfaCfGfggucUfgAfacgugscs | 1501 | csascgu(Uhd)CfaGfAfCfccguggausas | 2041 | AGCACGUUCAGACCCGUGGAUA | 2581 |
| 1426088 | u | | a | | U | |
| AD- | VPusUfsuggUfaUfAfuccaCfgGfgucugsa | 1502 | csasgac(Chd)CfgUfGfGfauauaccasas | 2042 | UUCAGACCCGUGGAUAUACCAA | 2582 |
| 1426094 | sa | | a | | G | |
| AD- | VPusGfsacuCfuUfGfguauAfuCfcacggsg | 1503 | cscsgug(Ghd)AfuAfUfAfccaagaguscs | 2043 | ACCCGUGGAUAUACCAAGAGUC | 2583 |
| 1426099 | su | | a | | C | |
| AD- | VPusGfsuugGfgAfCfucuuGfgUfauaucsc | 1504 | gsasuau(Ahd)CfcAfAfGfagucccaascs | 2044 | UGGAUAUACCAAGAGUCCCAAC | 2584 |
| 1426104 | sa | | a | | C | |
| AD- | VPusAfsguuGfgUfUfgggaCfuCfuuggusa | 1505 | ascscaa(Ghd)AfgUfCfCfcaaccaacsusa | 2045 | AUACCAAGAGUCCCAACCAACU | 2585 |
| 1426109 | su | | | | G | |
| AD- | VPusGfsugaCfcAfGfuuggUfuGfggacusc | 1506 | asgsucc(Chd)AfaCfCfAfacuggucascsa | 2046 | AGAGUCCCAACCAACUGGUCAC | 2586 |
| 1426115 | su | | | | C | |
| AD- | VPusAfscgaGfcUfGfgaguCfgGfcuugcsu | 1507 | gscsaag(Chd)CfgAfCfUfccagcucgsusa | 2047 | CAGCAAGCCGACUCCAGCUCGU | 2587 |
| 1426122 | sg | | | | A | |
| AD- | VPusGfscugAfuAfCfgagcUfgGfagucgsgs | 1508 | csgsacu(Chd)CfaGfCfUfcguaucagscs | 2048 | GCCGACUCCAGCUCGUAUCAGC | 2588 |
| 1426128 | c | | a | | C | |
| AD- | VPusAfsgguUfgAfUfggcuGfaUfacgagsc | 1509 | csuscgu(Ahd)UfcAfGfCfcaucaaccsus | 2049 | AGCUCGUAUCAGCCAUCAACCU | 2589 |
| 1426137 | su | | a | | C | |
| AD- | VPusCfsaguGfgAfGfagguUfgAfuggcusg | 1510 | asgscca(Uhd)CfaAfCfCfucuccacusgsa | 2050 | UCAGCCAUCAACCUCUCCACUGC | 2590 |
| 1426145 | sa | | | | | |
| AD- | VPusCfsuugGfcAfGfuggaGfaGfguugasu | 1511 | uscsaac(Chd)UfcUfCfCfacugccaasgsa | 2051 | CAUCAACCUCUCCACUGCCAAGG | 2591 |
| 1426150 | sg | | | | | |
| AD- | VPusGfsaauCfcUfUfggcaGfuGfgagagsg | 1512 | csuscuc(Chd)AfcUfGfCfcaaggauuscs | 2052 | ACCUCUCCACUGCCAAGGAUUC | 2592 |
| 1426155 | su | | a | | C | |
| AD- | VPusCfsggcUfuUfGfgaauCfcUfuggcasg | 1513 | usgscca(Ahd)GfgAfUfUfccaaagccsgs | 2053 | ACUGCCAAGGAUUCCAAAGCCG | 2593 |
| 1426163 | su | | a | | U | |
| AD- | VPusGfsugaCfcAfCfggcuUfuGfgaaucscs | 1514 | gsasuuc(Chd)AfaAfGfCfcguggucascs | 2054 | AGGAUUCCAAAGCCGUGGUCAC | 2594 |
| 1426170 | u | | a | | C | |
| AD- | VPusAfscacAfgGfUfgaccAfcGfgcuuusgs | 1515 | asasagc(Chd)GfuGfGfUfcaccugugsus | 2055 | CCAAAGCCGUGGUCACCUGUGU | 2595 |
| 1426176 | g | | a | | G | |
| AD- | VPusAfsaugAfuCfAfcacaGfgUfgaccascs | 1516 | usgsguc(Ahd)CfcUfGfUfgugaucausus | 2056 | CGUGGUCACCUGUGUGAUCAU | 2596 |
| 1426183 | g | | a | | UG | |
| AD- | VPusAfsgcaCfaAfUfgaucAfcAfcaggusgs | 1517 | ascscug(Uhd)GfuGfAfUfcauugugcsu | 2057 | UCACCUGUGUGAUCAUUGUGC | 2597 |
| 1426188 | a | | sa | | UG | |
| AD- | VPusAfscugAfcAfGfcacaAfuGfaucacsas | 1518 | gsusgau(Chd)AfuUfGfUfgcugucagsu | 2058 | GUGUGAUCAUUGUGCUGUCAG | 2598 |
| 1426194 | c | | sa | | UC | |
| AD- | VPusCfsacaCfcAfGfgacuGfaCfagcacsas | 1519 | gsusgcu(Ghd)UfcAfGfUfccuggugusgs | 2059 | UUGUGCUGUCAGUCCUGGUGU | 2599 |
| 1426203 | a | | a | | GC | |
| AD- | VPusAfsgacAfgCfAfcaccAfgGfacugascs | 1520 | uscsagu(Chd)CfuGfGfUfgugcugucsus | 2060 | UGUCAGUCCUGGUGUGCUGUC | 2600 |
| 1426209 | a | | a | | UU | |
| AD- | VPusAfsgugGfaAfGfacagCfaCfaccagsgs | 1521 | csusggu(Ghd)UfgCfUfGfucuuccacsus | 2061 | UCCUGGUGUGCUGUCUUCCACU | 2601 |
| 1426215 | a | | a | | G | |
| AD- | VPusAfsaccAfcCfUfguacCfaAfggaaasus | 1522 | ususucc(Uhd)UfgGfUfAfcagguggusu | 2062 | GAUUUCCUUGGUACAGGUGGU | 2602 |
| 1426222 | c | | sa | | UC | |
| AD- | VPusGfsagaGfaAfCfcaccUfgUfaccaasgs | 1523 | ususggu(Ahd)CfaGfGfUfgguucucuscs | 2063 | CCUUGGUACAGGUGGUUCUCU | 2603 |
| 1426227 | g | | a | | CC | |
| AD- | VPusCfscauUfgCfUfggagAfgAfaccacscs | 1524 | gsusggu(Uhd)CfuCfUfCfcagcaaugsgs | 2064 | AGGUGGUUCUCUCCAGCAAUGG | 2604 |
| 1426236 | u | | a | | G | |
| AD- | VPusGfsaagCfuCfCfcauuGfcUfggagasgs | 1525 | uscsucc(Ahd)GfcAfAfUfgggagcuuscs | 2065 | UCUCUCCAGCAAUGGGAGCUUC | 2605 |
| 1426243 | a | | a | | A | |
| AD- | VPusUfsaaaGfaAfUfgaagCfuCfccauusg | 1526 | asasugg(Ghd)AfgCfUfUfcauucuuusa | 2066 | GCAAUGGGAGCUUCAUUCUUU | 2606 |
| 1426251 | sc | | sa | | AC | |
| AD- | VPusUfscaaAfcUfGfguaaAfgAfaugaasg | 1527 | ususcau(Uhd)CfuUfUfAfccaguuugsa | 2067 | GCUUCAUUCUUUACCAGUUUG | 2607 |
| 1426260 | sc | | sa | | AA | |
| AD- | VPusAfsacaAfuUfCfaaacUfgGfuaaagsa | 1528 | csusuua(Chd)CfaGfUfUfugaauugusu | 2068 | UUCUUUACCAGUUUGAAUUGU | 2608 |
| 1426266 | sa | | sa | | UU | |
| AD- | VPusAfsaucCfaAfAfcaauUfcAfaacugsgs | 1529 | csasguu(Uhd)GfaAfUfUfguuuggausu | 2069 | ACCAGUUUGAAUUGUUUGGAU | 2609 |
| 1426272 | u | | sa | | UU | |
| AD- | VPusAfsagaGfuAfAfauccAfaAfcaauuscs | 1530 | asasuug(Uhd)UfuGfGfAfuuuacucusu | 2070 | UGAAUUGUUUGGAUUUACUCU | 2610 |
| 1426278 | a | | sa | | UA | |
| AD- | VPusCfsugaCfuUfGfaaaaAfuAfuaagasg | 1531 | uscsuua(Uhd)AfuUfUfUfucaagucasg | 2071 | ACUCUUAUAUUUUUCAAGUCA | 2611 |
| 1426289 | su | | sa | | GG | |
| AD- | VPusGfsguuUfaAfUfccugAfcUfugaaasa | 1532 | ususuca(Ahd)GfuCfAfGfgauuaaacscs | 2072 | UUUUUCAAGUCAGGAUUAAACC | 2612 |
| 1426298 | sa | | a | | C | |
| AD- | VPusUfsaaaAfgGfGfuuuaAfuCfcugacsu | 1533 | gsuscag(Ghd)AfuUfAfAfacccuuuusas | 2073 | AAGUCAGGAUUAAACCCUUUUA | 2613 |
| 1426304 | su | | a | | U | |
| AD- | VPusCfsgagAfaUfAfuauaAfaAfggguusu | 1534 | asasccc(Uhd)UfuUfAfUfauauucucsgs | 2074 | UAAACCCUUUUAUAUAUUCUCG | 2614 |
| 1426311 | sa | | a | | G | |
| AD- | VPusUfsguuCfcGfAfgaauAfuAfuaaaasg | 1535 | ususuua(Uhd)AfuAfUfUfcucggaacsa | 2075 | CCUUUUAUAUAUUCUCGGAACA | 2615 |
| 1426316 | sg | | sa | | G | |
| AD- | VPusUfsgcaCfuGfUfuccgAfgAfauauasu | 1536 | usasuau(Uhd)CfuCfGfGfaacagugcsas | 2076 | UAUAUAUUCUCGGAACAGUGCA | 2616 |
| 1426321 | sa | | a | | G | |
| AD- | VPusAfsgccCfuGfCfacugUfuCfcgagasas | 1537 | uscsucg(Ghd)AfaCfAfGfugcagggcsus | 2077 | AUUCUCGGAACAGUGCAGGGCU | 2617 |
| 1426326 | u | | a | | G | |
| AD- | VPusAfscuuUfcCfUfucucAfgCfccugcsas | 1538 | gscsagg(Ghd)CfuGfAfGfaaggaaagsus | 2078 | GUGCAGGGCUGAGAAGGAAAG | 2618 |
| 1426338 | c | | a | | UG | |
| AD- | VPusAfsgagCfaCfUfuuccUfuCfucagcscs | 1539 | gscsuga(Ghd)AfaGfGfAfaagugcucsus | 2079 | GGGCUGAGAAGGAAAGUGCUC | 2619 |
| 1426343 | c | | a | | UG | |
| AD- | VPusGfscacCfaGfAfgcacUfuUfccuucsus | 1540 | gsasagg(Ahd)AfaGfUfGfcucuggugscs | 2080 | GAGAAGGAAAGUGCUCUGGUG | 2620 |
| 1426348 | c | | a | | CC | |
| AD- | VPusCfsuauGfuAfUfuggaGfgCfaccagsa | 1541 | csusggu(Ghd)CfcUfCfCfaauacauasgs | 2081 | CUCUGGUGCCUCCAAUACAUAG | 2621 |
| 1426361 | sg | | a | | G | |
| AD- | VPusCfscagGfcCfUfauguAfuUfggaggscs | 1542 | cscsucc(Ahd)AfuAfCfAfuaggccugsgsa | 2082 | UGCCUCCAAUACAUAGGCCUGG | 2622 |
| 1426367 | a | | | | G | |
| AD- | VPusAfsaaaCfcCfAfggccUfaUfguauusgs | 1543 | asasuac(Ahd)UfaGfGfCfcuggguuusu | 2083 | CCAAUACAUAGGCCUGGGUUUU | 2623 |
| 1426372 | g | | sa | | U | |
| AD- | VPusUfscuuUfuGfUfuugcAfgCfagaaasa | 1544 | ususucu(Ghd)CfuGfCfAfaacaaaagsas | 2084 | UUUUUCUGCUGCAAACAAAAGA | 2624 |
| 1426373 | sa | | a | | C | |
| AD- | VPusAfsgucGfaGfUfcuuuUfgUfuugcasg | 1545 | usgscaa(Ahd)CfaAfAfAfgacucgacsus | 2085 | GCUGCAAACAAAAGACUCGACU | 2625 |
| 1426380 | sc | | a | | U | |
| AD- | VPusCfsucgAfaGfUfcgagUfcUfuuugusu | 1546 | ascsaaa(Ahd)GfaCfUfCfgacuucgasgs | 2086 | AAACAAAAGACUCGACUUCGAG | 2626 |
| 1426385 | su | | a | | C | |
| AD- | VPusCfsaugGfcUfCfgaagUfcGfagucusu | 1547 | asgsacu(Chd)GfaCfUfUfcgagccausgs | 2087 | AAAGACUCGACUUCGAGCCAUG | 2627 |
| 1426390 | su | | a | | G | |
| AD- | VPusUfsuuuCfcCfAfuggcUfcGfaagucsgs | 1548 | gsascuu(Chd)GfaGfCfCfaugggaaasas | 2088 | UCGACUUCGAGCCAUGGGAAAA | 2628 |
| 1426396 | a | | a | | G | |
| AD- | VPusUfsuccCfuUfUfucccAfuGfgcucgsas | 1549 | csgsagc(Chd)AfuGfGfGfaaaagggasas | 2089 | UUCGAGCCAUGGGAAAAGGGAA | 2629 |
| 1426401 | a | | a | | C | |
| AD- | VPusCfsgagGfuUfCfccuuUfuCfccaugsgs | 1550 | csasugg(Ghd)AfaAfAfGfggaaccucsgs | 2090 | GCCAUGGGAAAAGGGAACCUCG | 2630 |
| 1426406 | c | | a | | A | |
| AD- | VPusUfsugaCfuUfCfgaggUfuCfccuuusu | 1551 | asasagg(Ghd)AfaCfCfUfcgaagucasas | 2091 | GAAAAGGGAACCUCGAAGUCAA | 2631 |
| 1426413 | sc | | a | | C | |
| AD- | VPusUfsuucUfgUfUfgacuUfcGfagguusc | 1552 | asasccu(Chd)GfaAfGfUfcaacagaasas | 2092 | GGAACCUCGAAGUCAACAGAAA | 2632 |
| 1426419 | sc | | a | | C | |
| AD- | VPusGfsauuUfgUfUfucugUfuGfacuucs | 1553 | gsasagu(Chd)AfaCfAfGfaaacaaauscs | 2093 | UCGAAGUCAACAGAAACAAAUC | 2633 |
| 1426425 | gsa | | a | | C | |
| AD- | VPusGfsggaGfgAfUfuuguUfuCfuguugs | 1554 | csasaca(Ghd)AfaAfCfAfaauccuccscsa | 2094 | GUCAACAGAAACAAAUCCUCCCA | 2634 |
| 1426430 | asc | | | | | |
| AD- | VPusCfsaugAfuGfGfgaggAfuUfuguuusc | 1555 | asasaca(Ahd)AfuCfCfUfcccaucausgs | 2095 | AGAAACAAAUCCUCCCAUCAUG | 2635 |
| 1426436 | su | | a | | A | |
| AD- | VPusUfsuguUfuCfAfugauGfgGfaggaus | 1556 | asusccu(Chd)CfcAfUfCfaugaaacasas | 2096 | AAAUCCUCCCAUCAUGAAACAA | 2636 |
| 1426442 | usu | | a | | A | |
| AD- | VPusAfsgagUfuUfGfuuucAfuGfaugggsa | 1557 | cscscau(Chd)AfuGfAfAfacaaacucsus | 2097 | CUCCCAUCAUGAAACAAACUCU | 2637 |
| 1426447 | sg | | a | | G | |
| AD- | VPusGfsuagGfcAfGfaguuUfgUfuucausg | 1558 | asusgaa(Ahd)CfaAfAfCfucugccuascs | 2098 | UCAUGAAACAAACUCUGCCUAC | 2638 |
| 1426453 | sa | | a | | A | |
| AD- | VPusAfsgauAfaCfAfuguaGfgCfagagusu | 1559 | ascsucu(Ghd)CfcUfAfCfauguuaucsus | 2099 | AAACUCUGCCUACAUGUUAUCU | 2639 |
| 1426462 | su | | a | | C | |
| AD- | VPusUfsuugGfaGfAfuaacAfuGfuaggcsa | 1560 | gscscua(Chd)AfuGfUfUfaucuccaasas | 2100 | CUGCCUACAUGUUAUCUCCAAA | 2640 |
| 1426467 | sg | | a | | G | |
| AD- | VPusGfsuggCfuUfUfggagAfuAfacaugsu | 1561 | csasugu(Uhd)AfuCfUfCfcaaagccascs | 2101 | UACAUGUUAUCUCCAAAGCCAC | 2641 |
| 1426472 | sa | | a | | A | |
| AD- | VPusAfsuuuCfuUfCfugugGfcUfuuggasg | 1562 | uscscaa(Ahd)GfcCfAfCfagaagaaasus | 2102 | UCUCCAAAGCCACAGAAGAAAU | 2642 |
| 1426481 | sa | | a | | U | |
| AD- | VPusCfsacaAfaUfUfucuuCfuGfuggcusu | 1563 | asgscca(Chd)AfgAfAfGfaaauuugusgs | 2103 | AAAGCCACAGAAGAAAUUUGUG | 2643 |
| 1426486 | su | | a | | G | |
| AD- | VPusUfsgguCfcAfCfaaauUfuCfuucugsu | 1564 | csasgaa(Ghd)AfaAfUfUfuguggaccsas | 2104 | CACAGAAGAAAUUUGUGGACCA | 2644 |
| 1426491 | sg | | a | | G | |
| AD- | VPusAfsagcCfuGfGfuccaCfaAfauuucsus | 1565 | gsasaau(Uhd)UfgUfGfGfaccaggcusus | 2105 | AAGAAAUUUGUGGACCAGGCU | 2645 |
| 1426496 | u | | a | | UG | |
| AD- | VPusAfscuuGfgGfCfcacaAfgCfcugguscs | 1566 | ascscag(Ghd)CfuUfGfUfggcccaagsus | 2106 | GGACCAGGCUUGUGGCCCAAGU | 2646 |
| 1426507 | c | | a | | C | |
| AD- | VPusUfsuugAfaUfGfacuuGfgGfccacasa | 1567 | usgsugg(Chd)CfcAfAfGfucauucaasas | 2107 | CUUGUGGCCCAAGUCAUUCAAA | 2647 |
| 1426515 | sg | | a | | A | |
| AD- | VPusUfsuucUfuUfUfgaauGfaCfuugggsc | 1568 | cscscaa(Ghd)UfcAfUfUfcaaaagaasas | 2108 | GGCCCAAGUCAUUCAAAAGAAA | 2648 |
| 1426520 | sc | | a | | G | |
| AD- | VPusAfsccaUfaCfUfuucuUfuUfgaaugsa | 1569 | csasuuc(Ahd)AfaAfGfAfaaguauggsus | 2109 | GUCAUUCAAAAGAAAGUAUGG | 2649 |
| 1426527 | sc | | a | | UG | |
| AD- | VPusGfsacuCfaCfCfauacUfuUfcuuuusg | 1570 | asasaag(Ahd)AfaGfUfAfuggugaguscs | 2110 | UCAAAAGAAAGUAUGGUGAGUC | 2650 |
| 1426532 | sa | | a | | C | |
| AD- | VPusAfsucuUfgGfGfacucAfcCfauacusu | 1571 | asgsuau(Ghd)GfuGfAfGfucccaagasu | 2111 | AAAGUAUGGUGAGUCCCAAGAU | 2651 |
| 1426539 | su | | sa | | C | |
| AD- | VPusAfsgcaGfaGfAfucuuGfgGfacucasc | 1572 | usgsagu(Chd)CfcAfAfGfaucucugcsus | 2112 | GGUGAGUCCCAAGAUCUCUGCU | 2652 |
| 1426546 | sc | | a | | G | |
| AD- | VPusUfsgucCfaGfCfagagAfuCfuugggsas | 1573 | cscscaa(Ghd)AfuCfUfCfugcuggacsas | 2113 | GUCCCAAGAUCUCUGCUGGACA | 2653 |
| 1426551 | c | | a | | U | |
| AD- | VPusGfsuugAfuGfUfccagCfaGfagaucsu | 1574 | gsasucu(Chd)UfgCfUfGfgacaucaascs | 2114 | AAGAUCUCUGCUGGACAUCAAC | 2654 |
| 1426556 | su | | a | | A | |
| AD- | VPusAfscagUfgUfUfgaugUfcCfagcagsas | 1575 | csusgcu(Ghd)GfaCfAfUfcaacacugsus | 2115 | CUCUGCUGGACAUCAACACUGU | 2655 |
| 1426561 | g | | a | | G | |
| AD- | VPusCfsugaCfcAfCfagugUfuGfaugucscs | 1576 | gsascau(Chd)AfaCfAfCfuguggucasgs | 2116 | UGGACAUCAACACUGUGGUCAG | 2656 |
| 1426567 | a | | a | | A | |
| AD- | VPusAfsgcuGfcUfCfugacCfaCfagugusus | 1577 | ascsacu(Ghd)UfgGfUfCfagagcagcsus | 2117 | CAACACUGUGGUCAGAGCAGCU | 2657 |
| 1426574 | g | | a | | C | |
| AD- | VPusAfsaggUfuCfAfauccGfaGfuguugsa | 1578 | csasaca(Chd)UfcGfGfAfuugaaccusus | 2118 | AUCAACACUCGGAUUGAACCUU | 2658 |
| 1426583 | su | | a | | A | |
| AD- | VPusGfsuagUfaAfGfguucAfaUfccgagsu | 1579 | csuscgg(Ahd)UfuGfAfAfccuuacuascs | 2119 | CACUCGGAUUGAACCUUACUAC | 2659 |
| 1426588 | sg | | a | | A | |
| AD- | VPusGfsaugCfuGfUfaguaAfgGfuucaasu | 1580 | ususgaa(Chd)CfuUfAfCfuacagcauscs | 2120 | GAUUGAACCUUACUACAGCAUC | 2660 |
| 1426594 | sc | | a | | U | |
| AD- | VPusUfsuauAfgAfUfgcugUfaGfuaaggsu | 1581 | cscsuua(Chd)UfaCfAfGfcaucuauasas | 2121 | AACCUUACUACAGCAUCUAUAA | 2661 |
| 1426599 | su | | a | | C | |
| AD- | VPusUfsgcuGfuUfAfuagaUfgCfuguagsu | 1582 | csusaca(Ghd)CfaUfCfUfauaacagcsas | 2122 | UACUACAGCAUCUAUAACAGCA | 2662 |
| 1426604 | sa | | a | | G | |
| AD- | VPusAfsaggGfcUfGfcuguUfaUfagaugsc | 1583 | csasucu(Ahd)UfaAfCfAfgcagcccusus | 2123 | AGCAUCUAUAACAGCAGCCCUU | 2663 |
| 1426610 | su | | a | | C | |
| AD- | VPusAfsaguUfaCfAfugggCfuGfcucucscs | 1584 | gsasgag(Chd)AfgCfCfCfauguaacusus | 2124 | AGGAGAGCAGCCCAUGUAACUU | 2664 |
| 1426638 | u | | a | | A | |
| AD- | VPusGfscugUfaAfGfuuacAfuGfggcugsc | 1585 | csasgcc(Chd)AfuGfUfAfacuuacagscs | 2125 | AGCAGCCCAUGUAACUUACAGC | 2665 |
| 1426643 | su | | a | | C | |
| AD- | VPusUfsuacUfgGfCfuguaAfgUfuacausg | 1586 | asusgua(Ahd)CfuUfAfCfagccaguasas | 2126 | CCAUGUAACUUACAGCCAGUAA | 2666 |
| 1426649 | sg | | a | | A | |
| AD- | VPusAfsagaGfuUfUfacugGfcUfguaagsu | 1587 | csusuac(Ahd)GfcCfAfGfuaaacucusus | 2127 | AACUUACAGCCAGUAAACUCUU | 2667 |
| 1426655 | su | | a | | U | |
| AD- | VPusAfsaucCfaAfAfagagUfuUfacuggscs | 1588 | cscsagu(Ahd)AfaCfUfCfuuuuggausus | 2128 | AGCCAGUAAACUCUUUUGGAUU | 2668 |
| 1426662 | u | | a | | U | |
| AD- | VPusAfsuugGfcAfAfauccAfaAfagagusu | 1589 | ascsucu(Uhd)UfuGfGfAfuuugccaasu | 2129 | AAACUCUUUUGGAUUUGCCAAU | 2669 |
| 1426669 | su | | sa | | U | |
| AD- | VPusAfsauaUfaUfGfaauuGfgCfaaaucsc | 1590 | gsasuuu(Ghd)CfcAfAfUfucauauausu | 2130 | UGGAUUUGCCAAUUCAUAUAU | 2670 |
| 1426678 | sa | | sa | | UG | |
| AD- | VPusAfsugcAfuGfGfcaauAfuAfugaausu | 1591 | asusuca(Uhd)AfuAfUfUfgccaugcasus | 2131 | CAAUUCAUAUAUUGCCAUGCAU | 2671 |
| 1426687 | sg | | a | | U | |
| AD- | VPusGfsugaUfaAfUfgcauGfgCfaauausa | 1592 | asusauu(Ghd)CfcAfUfGfcauuaucascs | 2132 | AUAUAUUGCCAUGCAUUAUCAC | 2672 |
| 1426693 | su | | a | | A | |
| AD- | VPusUfsuagUfgGfUfgugaUfaAfugcausg | 1593 | asusgca(Uhd)UfaUfCfAfcaccacuasas | 2133 | CCAUGCAUUAUCACACCACUAA | 2673 |
| 1426701 | sg | | a | | U | |
| AD- | VPusAfsaguCfaUfUfagugGfuGfugauasa | 1594 | usasuca(Chd)AfcCfAfCfuaaugacusus | 2134 | AUUAUCACACCACUAAUGACUU | 2674 |
| 1426707 | su | | a | | A | |
| AD- | VPusGfscacUfaAfGfucauUfaGfuggugsu | 1595 | csascca(Chd)UfaAfUfGfacuuagugscs | 2135 | CACACCACUAAUGACUUAGUGC | 2675 |
| 1426712 | sg | | a | | A | |
| AD- | VPusUfsauuCfcUfGfcacuAfaGfucauusa | 1596 | asasuga(Chd)UfuAfGfUfgcaggaausas | 2136 | CUAAUGACUUAGUGCAGGAAUA | 2676 |
| 1426719 | sg | | a | | U | |
| AD- | VPusCfsuguCfaUfAfuuccUfgCfacuaasgs | 1597 | ususagu(Ghd)CfaGfGfAfauaugacasg | 2137 | ACUUAGUGCAGGAAUAUGACAG | 2677 |
| 1426725 | u | | sa | | C | |
| AD- | VPusAfsaguGfcUfGfucauAfuUfccugcsa | 1598 | gscsagg(Ahd)AfuAfUfGfacagcacusus | 2138 | GUGCAGGAAUAUGACAGCACUU | 2678 |
| 1426730 | sc | | a | | C | |
| AD- | VPusUfsuggCfuGfAfagugCfuGfucauasu | 1599 | usasuga(Chd)AfgCfAfCfuucagccasas | 2139 | AAUAUGACAGCACUUCAGCCAA | 2679 |
| 1426737 | su | | a | | G | |
| AD- | VPusGfsaauCfuGfCfuuggCfuGfaagugsc | 1600 | csascuu(Chd)AfgCfCfAfagcagauuscs | 2140 | AGCACUUCAGCCAAGCAGAUUC | 2680 |
| 1426745 | su | | a | | C | |
| AD- | VPusGfsacuGfgAfAfucugCfuUfggcugsa | 1601 | csasgcc(Ahd)AfgCfAfGfauuccaguscs | 2141 | UUCAGCCAAGCAGAUUCCAGUC | 2681 |
| 1426750 | sa | | a | | C | |
| AD- | VPusCfsuccAfuGfAfcuuuAfaAfcggagsgs | 1602 | csusccg(Uhd)UfuAfAfAfgucauggasgs | 2142 | CCCUCCGUUUAAAGUCAUGGAG | 2682 |
| 1426752 | g | | a | | G | |
| AD- | VPusCfscuaUfaGfCfcuccAfuGfacuuusa | 1603 | asasagu(Chd)AfuGfGfAfggcuauagsgs | 2143 | UUAAAGUCAUGGAGGCUAUAG | 2683 |
| 1426760 | sa | | a | | GA | |
| AD- | VPusCfsauaAfgAfUfccuaUfaGfccuccsas | 1604 | gsgsagg(Chd)UfaUfAfGfgaucuuausgs | 2144 | AUGGAGGCUAUAGGAUCUUAU | 2684 |
| 1426768 | u | | a | | GU | |
| AD- | VPusGfsuuuAfcAfUfaagaUfcCfuauagsc | 1605 | csusaua(Ghd)GfaUfCfUfuauguaaasc | 2145 | GGCUAUAGGAUCUUAUGUAAA | 2685 |
| 1426773 | sc | | sa | | CA | |
| AD- | VPusAfsaacUfgUfUfuacaUfaAfgauccsu | 1606 | gsgsauc(Uhd)UfaUfGfUfaaacaguusu | 2146 | UAGGAUCUUAUGUAAACAGUU | 2686 |
| 1426778 | sa | | sa | | UU | |
| AD- | VPusAfsucaGfaAfAfcaaaAfaCfuguuusa | 1607 | asasaca(Ghd)UfuUfUfUfguuucugasu | 2147 | GUAAACAGUUUUUGUUUCUGA | 2687 |
| 1426789 | sc | | sa | | UA | |
| AD- | VPusUfsuacUfaUfCfagaaAfcAfaaaacsus | 1608 | gsusuuu(Uhd)GfuUfUfCfugauaguasa | 2148 | CAGUUUUUGUUUCUGAUAGUA | 2688 |
| 1426794 | g | | sa | | AU | |
| AD- | VPusGfsuccAfuUfAfcuauCfaGfaaacasa | 1609 | usgsuuu(Chd)UfgAfUfAfguaauggasc | 2149 | UUUGUUUCUGAUAGUAAUGGA | 2689 |
| 1426799 | sa | | sa | | CU | |
| AD- | VPusAfsuaaAfgUfCfcauuAfcUfaucagsa | 1610 | csusgau(Ahd)GfuAfAfUfggacuuuasu | 2150 | UUCUGAUAGUAAUGGACUUUA | 2690 |
| 1426804 | sa | | sa | | UU | |
| AD- | VPusAfsaguUfaGfAfauaaAfgUfccauusa | 1611 | asasugg(Ahd)CfuUfUfAfuucuaacusu | 2151 | GUAAUGGACUUUAUUCUAACU | 2691 |
| 1426812 | sc | | sa | | UG | |
| AD- | VPusUfsgauCfuCfAfaguuAfgAfauaaasg | 1612 | ususuau(Uhd)CfuAfAfCfuugagaucsa | 2152 | ACUUUAUUCUAACUUGAGAUCA | 2692 |
| 1426819 | su | | sa | | G | |
| AD- | VPusGfsccaCfuGfAfucucAfaGfuuagasa | 1613 | uscsuaa(Chd)UfuGfAfGfaucaguggscs | 2153 | AUUCUAACUUGAGAUCAGUGGC | 2693 |
| 1426824 | su | | a | | G | |
| AD- | VPusUfsuugAfuCfCfgccaCfuGfaucucsas | 1614 | gsasgau(Chd)AfgUfGfGfcggaucaasas | 2154 | UUGAGAUCAGUGGCGGAUCAA | 2694 |
| 1426832 | a | | a | | AA | |
| AD- | VPusUfsaggUfuUfUfgaucCfgCfcacugsa | 1615 | csasgug(Ghd)CfgGfAfUfcaaaaccusas | 2155 | AUCAGUGGCGGAUCAAAACCUA | 2695 |
| 1426837 | su | | a | | C | |
| AD- | VPusAfsaucUfuGfUfagguUfuUfgauccsg | 1616 | gsgsauc(Ahd)AfaAfCfCfuacaagausus | 2156 | GCGGAUCAAAACCUACAAGAUU | 2696 |
| 1426844 | sc | | a | | C | |
| AD- | VPusAfsguuGfaAfUfcuugUfaGfguuuus | 1617 | asasaac(Chd)UfaCfAfAfgauucaacsus | 2157 | UCAAAACCUACAAGAUUCAACU | 2697 |
| 1426849 | gsa | | a | | G | |
| AD- | VPusUfsuuuCfaGfUfugaaUfcUfuguagsg | 1618 | csusaca(Ahd)GfaUfUfCfaacugaaasas | 2158 | ACCUACAAGAUUCAACUGAAAA | 2698 |
| 1426854 | su | | a | | G | |
| AD- | VPusCfscaaCfuUfUfucagUfuGfaaucusu | 1619 | asgsauu(Chd)AfaCfUfGfaaaaguugsgs | 2159 | CAAGAUUCAACUGAAAAGUUGG | 2699 |
| 1426859 | sg | | a | | C | |
| AD- | VPusUfsaacUfgCfCfaacuUfuUfcaguusg | 1620 | asascug(Ahd)AfaAfGfUfuggcaguusas | 2160 | UCAACUGAAAAGUUGGCAGUUA | 2700 |
| 1426865 | sa | | a | | U | |
| AD- | VPusAfsaacCfaUfAfacugCfcAfacuuusus | 1621 | asasagu(Uhd)GfgCfAfGfuuaugguusu | 2161 | GAAAAGUUGGCAGUUAUGGUU | 2701 |
| 1426871 | c | | sa | | UU | |
| AD- | VPusAfsaagAfaAfAfccauAfaCfugccasas | 1622 | usgsgca(Ghd)UfuAfUfGfguuuucuusu | 2162 | GUUGGCAGUUAUGGUUUUCUU | 2702 |
| 1426876 | c | | sa | | UC | |
| AD- | VPusAfsgauGfaAfAfgaaaAfcCfauaacsus | 1623 | gsusuau(Ghd)GfuUfUfUfcuuucaucsu | 2163 | CAGUUAUGGUUUUCUUUCAUC | 2703 |
| 1426881 | g | | sa | | UG | |
| AD- | VPusUfsgacAfcAfUfcagaUfgAfaagaasas | 1624 | ususcuu(Uhd)CfaUfCfUfgaugugucsa | 2164 | UUUUCUUUCAUCUGAUGUGUC | 2704 |
| 1426890 | a | | sa | | AG | |
| AD- | VPusAfsgauAfcUfGfacacAfuCfagaugsas | 1625 | csasucu(Ghd)AfuGfUfGfucaguaucsu | 2165 | UUCAUCUGAUGUGUCAGUAUC | 2705 |
| 1426896 | a | | sa | | UG | |
| AD- | VPusAfsucaAfcAfGfauacUfgAfcacauscs | 1626 | asusgug(Uhd)CfaGfUfAfucuguugasu | 2166 | UGAUGUGUCAGUAUCUGUUGA | 2706 |
| 1426902 | a | | sa | | UU | |
| AD- | VPusAfsagcAfaAfUfcaacAfgAfuacugsas | 1627 | csasgua(Uhd)CfuGfUfUfgauuugcusu | 2167 | GUCAGUAUCUGUUGAUUUGCU | 2707 |
| 1426908 | c | | sa | | UU | |
| AD- | VPusAfsaacUfaCfAfaagcAfaAfucaacsas | 1628 | gsusuga(Uhd)UfuGfCfUfuuguaguusu | 2168 | CUGUUGAUUUGCUUUGUAGUU | 2708 |
| 1426916 | g | | sa | | UG | |
| AD- | VPusAfsuguCfaAfCfaaacUfaCfaaagcsas | 1629 | gscsuuu(Ghd)UfaGfUfUfuguugacasu | 2169 | UUGCUUUGUAGUUUGUUGACA | 2709 |
| 1426923 | a | | sa | | UC | |
| AD- | VPusUfsuaaGfaUfGfucaaCfaAfacuacsa | 1630 | gsusagu(Uhd)UfgUfUfGfacaucuuasa | 2170 | UUGUAGUUUGUUGACAUCUUA | 2710 |
| 1426928 | sa | | sa | | AG | |
| AD- | VPusAfsaauCfuUfAfagauGfuCfaacaasa | 1631 | ususguu(Ghd)AfcAfUfCfuuaagauusu | 2171 | GUUUGUUGACAUCUUAAGAUU | 2711 |
| 1426933 | sc | | sa | | UG | |
| AD- | VPusAfscauCfaAfAfucuuAfaGfaugucsa | 1632 | gsascau(Chd)UfuAfAfGfauuugaugsu | 2172 | UUGACAUCUUAAGAUUUGAUG | 2712 |
| 1426938 | sa | | sa | | UG | |
| AD- | VPusAfscuuUfcAfCfaucaAfaUfcuuaasg | 1633 | ususaag(Ahd)UfuUfGfAfugugaaagsu | 2173 | UCUUAAGAUUUGAUGUGAAAG | 2713 |
| 1426944 | sa | | sa | | UU | |
| AD- | VPusUfscuaAfaAfCfuuucAfcAfucaaasu | 1634 | ususuga(Uhd)GfuGfAfAfaguuuuagsa | 2174 | GAUUUGAUGUGAAAGUUUUAG | 2714 |
| 1426950 | sc | | sa | | AU | |

TABLE 4
In Vitro Single Dose Screen in Hepa1-6 Cells

| | RLuc/FLuc | |
|---|---|---|
| | 10 nM | |
| Duplex Name | % average message remaining | SD |
| AD-1425192.1 | 8.565 | 0.498 |
| AD-1425186.1 | 8.465 | 0.764 |
| AD-1425180.1 | 17.453 | 1.691 |
| AD-1425175.1 | 9.590 | 0.784 |
| AD-1425170.1 | 11.877 | 1.230 |
| AD-1425165.1 | 5.945 | 0.485 |
| AD-1425158.1 | 7.310 | 0.948 |
| AD-1425150.1 | 10.780 | 1.036 |
| AD-1425144.1 | 6.601 | 0.560 |
| AD-1425138.1 | 7.060 | 0.644 |
| AD-1425132.1 | 8.986 | 0.341 |
| AD-1425123.1 | 6.734 | 0.563 |
| AD-1425118.1 | 11.254 | 0.751 |
| AD-1425113.1 | 8.444 | 0.395 |
| AD-1425107.1 | 7.246 | 0.413 |
| AD-1425101.1 | 20.128 | 1.939 |
| AD-1425096.1 | 12.141 | 0.735 |
| AD-1425091.1 | 12.598 | 0.800 |
| AD-1425086.1 | 18.239 | 0.877 |
| AD-1425079.1 | 22.619 | 0.326 |
| AD-1425074.1 | 13.860 | 0.689 |
| AD-1425066.1 | 14.325 | 0.614 |
| AD-1425061.1 | 7.542 | 0.687 |
| AD-1425054.1 | 6.767 | 0.244 |
| AD-1425046.1 | 10.605 | 0.739 |
| AD-1425041.1 | 14.578 | 1.037 |
| AD-1425036.1 | 8.267 | 0.982 |
| AD-1425031.1 | 12.969 | 1.131 |
| AD-1425020.1 | 9.164 | 0.312 |
| AD-1425015.1 | 13.841 | 2.024 |
| AD-1425010.1 | 33.159 | 0.983 |
| AD-1425002.1 | 61.691 | 2.486 |
| AD-1424994.1 | 46.510 | 3.765 |
| AD-1424992.1 | 35.041 | 0.992 |
| AD-1424987.1 | 25.453 | 1.471 |
| AD-1424979.1 | 16.676 | 1.108 |
| AD-1424972.1 | 21.708 | 1.639 |
| AD-1424967.1 | 13.993 | 0.745 |
| AD-1424961.1 | 17.721 | 0.966 |
| AD-1424954.1 | 47.054 | 1.432 |
| AD-1424949.1 | 21.479 | 1.792 |
| AD-1424943.1 | 16.120 | 1.091 |
| AD-1424935.1 | 42.873 | 2.471 |
| AD-1424929.1 | 9.644 | 0.814 |
| AD-1424920.1 | 12.141 | 1.338 |
| AD-1424911.1 | 8.482 | 0.695 |
| AD-1424904.1 | 13.597 | 1.200 |
| AD-1424897.1 | 13.075 | 1.090 |
| AD-1424891.1 | 50.540 | 2.915 |
| AD-1424885.1 | 31.245 | 2.013 |
| AD-1424880.1 | 36.367 | 1.591 |
| AD-1424852.1 | 22.117 | 1.970 |
| AD-1424846.1 | 28.804 | 1.805 |
| AD-1424841.1 | 14.574 | 1.162 |
| AD-1424836.1 | 21.257 | 1.413 |
| AD-1424830.1 | 16.262 | 0.373 |
| AD-1424825.1 | 13.649 | 0.627 |
| AD-1424816.1 | 55.468 | 5.151 |
| AD-1424809.1 | 32.073 | 0.933 |
| AD-1424803.1 | 43.880 | 2.936 |
| AD-1424798.1 | 32.087 | 1.719 |
| AD-1424793.1 | 47.575 | 5.991 |
| AD-1424788.1 | 50.901 | 4.298 |
| AD-1424781.1 | 24.548 | 2.975 |
| AD-1424774.1 | 14.471 | 1.268 |
| AD-1424769.1 | 32.269 | 1.466 |
| AD-1424762.1 | 23.334 | 3.213 |
| AD-1424757.1 | 32.328 | 2.544 |
| AD-1424749.1 | 67.802 | 4.870 |
| AD-1424738.1 | 22.873 | 1.466 |
| AD-1424733.1 | 29.561 | 1.747 |
| AD-1424728.1 | 66.435 | 5.331 |
| AD-1424723.1 | 26.834 | 0.706 |
| AD-1424714.1 | 27.862 | 1.676 |
| AD-1424709.1 | 14.536 | 1.000 |
| AD-1424704.1 | 25.917 | 1.689 |
| AD-1424695.1 | 15.127 | 0.613 |
| AD-1424689.1 | 15.587 | 0.697 |
| AD-1424684.1 | 46.487 | 3.711 |
| AD-1424678.1 | 16.130 | 0.799 |
| AD-1424672.1 | 24.262 | 3.048 |
| AD-1424667.1 | 18.150 | 1.678 |
| AD-1424661.1 | 25.616 | 1.655 |
| AD-1424655.1 | 38.626 | 1.797 |
| AD-1424648.1 | 50.175 | 3.818 |
| AD-1424643.1 | 42.709 | 3.591 |
| AD-1424638.1 | 44.915 | 2.539 |
| AD-1424632.1 | 49.865 | 4.824 |
| AD-1424627.1 | 55.723 | 6.908 |
| AD-1424622.1 | 43.846 | 1.080 |
| AD-1424615.1 | 32.033 | 2.025 |
| AD-1424614.1 | 30.788 | 1.149 |
| AD-1424609.1 | 61.666 | 4.642 |
| AD-1424603.1 | 65.665 | 3.768 |
| AD-1424590.1 | 53.062 | 3.860 |
| AD-1424585.1 | 28.415 | 1.899 |
| AD-1424580.1 | 55.078 | 1.686 |
| AD-1424568.1 | 41.515 | 1.982 |
| AD-1424563.1 | 19.505 | 1.250 |
| AD-1424558.1 | 23.028 | 0.993 |
| AD-1424553.1 | 16.284 | 0.985 |
| AD-1424546.1 | 11.187 | 0.706 |
| AD-1424540.1 | 17.507 | 1.012 |
| AD-1424531.1 | 17.320 | 1.283 |
| AD-1424520.1 | 4.630 | 0.232 |
| AD-1424514.1 | 9.939 | 0.812 |
| AD-1424508.1 | 8.556 | 0.754 |
| AD-1424502.1 | 21.349 | 0.877 |
| AD-1424493.1 | 17.843 | 1.747 |
| AD-1424485.1 | 30.610 | 2.631 |
| AD-1424478.1 | 61.007 | 3.912 |
| AD-1424469.1 | 32.853 | 1.369 |
| AD-1424464.1 | 51.900 | 3.541 |
| AD-1424457.1 | 29.556 | 2.357 |
| AD-1424451.1 | 34.874 | 2.531 |
| AD-1424445.1 | 70.386 | 8.353 |
| AD-1424436.1 | 48.471 | 3.818 |
| AD-1424430.1 | 45.783 | 1.769 |
| AD-1424425.1 | 50.950 | 3.366 |
| AD-1424418.1 | 87.204 | 6.562 |
| AD-1424412.1 | 73.274 | 2.931 |
| AD-1424405.1 | 75.847 | 4.689 |
| AD-1424397.1 | 62.232 | 5.118 |
| AD-1424392.1 | 76.901 | 4.989 |
| AD-1424387.1 | 46.468 | 4.034 |
| AD-1424379.1 | 53.521 | 5.586 |
| AD-1424370.1 | 42.451 | 2.531 |
| AD-1424364.1 | 43.564 | 5.238 |
| AD-1424357.1 | 45.116 | 3.278 |
| AD-1424351.1 | 38.097 | 0.970 |
| AD-1424346.1 | 39.452 | 3.109 |
| AD-1424341.1 | 33.698 | 2.879 |
| AD-1424336.1 | 25.375 | 1.957 |
| AD-1424330.1 | 41.628 | 4.031 |
| AD-1424324.1 | 37.701 | 3.407 |
| AD-1424318.1 | 26.294 | 0.515 |
| AD-1424312.1 | 24.052 | 0.981 |
| AD-1424305.1 | 27.852 | 2.316 |
| AD-1424299.1 | 22.584 | 2.086 |
| AD-1424294.1 | 51.519 | 1.803 |
| AD-1424289.1 | 42.941 | 1.678 |
| AD-1424270.1 | 35.257 | 3.744 |
| AD-1424265.1 | 62.888 | 5.700 |
| AD-1424246.1 | 84.658 | 9.451 |
| AD-1424241.1 | 44.204 | 3.016 |
| AD-1424234.1 | 50.357 | 4.163 |
| AD-1424226.1 | 27.269 | 2.365 |
| AD-1424223.1 | 33.605 | 4.209 |
| AD-1424218.1 | 29.956 | 2.667 |
| AD-1424213.1 | 59.975 | 5.991 |
| AD-1424207.1 | 52.313 | 0.765 |
| AD-1424194.1 | 20.673 | 0.074 |
| AD-1424188.1 | 12.924 | 0.655 |
| AD-1424180.1 | 29.629 | 2.075 |
| AD-1424175.1 | 89.041 | 8.803 |
| AD-1424169.1 | 26.243 | 1.322 |
| AD-1424161.1 | 59.462 | 2.316 |
| AD-1424154.1 | 46.060 | 4.064 |
| AD-1424148.1 | 41.628 | 3.914 |
| AD-1424140.1 | 25.862 | 0.910 |
| AD-1424135.1 | 39.521 | 3.588 |
| AD-1424130.1 | 18.847 | 1.395 |
| AD-1424123.1 | 15.079 | 0.890 |
| AD-1424117.1 | 26.131 | 1.974 |
| AD-1424111.1 | 59.254 | 2.466 |
| AD-1424105.1 | 69.488 | 2.791 |
| AD-1424096.1 | 49.312 | 4.503 |
| AD-1424091.1 | 58.003 | 3.345 |
| AD-1424086.1 | 59.559 | 5.148 |
| AD-1424080.1 | 45.710 | 4.656 |
| AD-1424073.1 | 34.564 | 2.136 |
| AD-1424064.1 | 25.792 | 0.263 |
| AD-1424058.1 | 26.141 | 1.486 |
| AD-1424053.1 | 22.964 | 0.633 |
| AD-1424045.1 | 46.093 | 1.286 |
| AD-1424037.1 | 50.301 | 2.777 |
| AD-1424031.1 | 59.288 | 2.768 |
| AD-1424026.1 | 63.280 | 1.294 |
| AD-1424020.1 | 48.844 | 1.971 |
| AD-1424013.1 | 41.244 | 1.054 |
| AD-1424005.1 | 51.622 | 3.232 |
| AD-1423999.1 | 70.360 | 4.550 |
| AD-1423994.1 | 55.737 | 3.120 |
| AD-1423987.1 | 79.210 | 7.576 |
| AD-1423982.1 | 79.666 | 6.276 |
| AD-1423977.1 | 66.658 | 5.507 |
| AD-1423969.1 | 80.646 | 8.227 |
| AD-1423954.1 | 77.674 | 8.142 |
| AD-1423943.1 | 37.922 | 0.962 |
| AD-1423937.1 | 44.128 | 1.943 |
| AD-1423932.1 | 37.391 | 1.634 |
| AD-1423927.1 | 22.455 | 2.224 |
| AD-1423922.1 | 25.465 | 1.303 |
| AD-1423917.1 | 28.178 | 2.669 |
| AD-1423912.1 | 38.313 | 1.448 |
| AD-1423906.1 | 34.517 | 2.554 |
| AD-1423897.1 | 31.939 | 1.213 |
| AD-1423892.1 | 40.328 | 3.701 |
| AD-1423887.1 | 28.423 | 1.593 |
| AD-1423882.1 | 26.036 | 1.091 |
| AD-1423875.1 | 79.201 | 4.253 |
| AD-1423870.1 | 56.439 | 2.547 |
| AD-1423861.1 | 54.184 | 3.822 |
| AD-1423856.1 | 22.758 | 2.147 |
| AD-1423851.1 | 15.026 | 1.285 |
| AD-1423846.1 | 22.688 | 1.849 |
| AD-1423843.1 | 38.875 | 4.109 |
| AD-1423838.1 | 30.603 | 1.600 |
| AD-1423832.1 | 30.326 | 2.507 |
| AD-1423827.1 | 55.697 | 2.698 |
| AD-1423822.1 | 50.081 | 2.653 |
| AD-1423816.1 | 38.886 | 3.117 |
| AD-1423811.1 | 45.890 | 2.315 |
| AD-1423805.1 | 18.962 | 1.465 |
| AD-1423798.1 | 24.747 | 1.229 |
| AD-1423792.1 | 10.379 | 0.563 |
| AD-1423785.1 | 15.091 | 1.021 |
| AD-1423780.1 | 32.895 | 1.437 |
| AD-1423775.1 | 107.478 | 7.532 |
| AD-1423767.1 | 73.371 | 4.919 |
| AD-1423762.1 | 18.272 | 1.397 |
| AD-1423757.1 | 27.940 | 1.890 |
| AD-1423754.1 | 19.282 | 1.474 |
| AD-1423749.1 | 20.065 | 0.874 |
| AD-1423744.1 | 43.399 | 4.875 |
| AD-1423739.1 | 31.176 | 2.119 |
| AD-1423734.1 | 50.170 | 6.254 |
| AD-1423729.1 | 60.182 | 6.148 |
| AD-1423722.1 | 59.997 | 6.924 |
| AD-1423713.1 | 28.716 | 2.353 |
| AD-1423708.1 | 51.666 | 2.837 |
| AD-1423699.1 | 28.611 | 1.053 |
| AD-1423694.1 | 26.086 | 1.940 |
| AD-1423689.1 | 60.039 | 5.396 |
| AD-1423684.1 | 66.325 | 4.148 |
| AD-1423679.1 | 66.168 | 8.444 |
| AD-1423671.1 | 33.591 | 1.979 |
| AD-1423666.1 | 28.115 | 1.353 |
| AD-1423660.1 | 52.412 | 1.846 |
| AD-1423655.1 | 122.678 | 9.520 |
| AD-1423640.1 | 54.833 | 3.355 |
| AD-1423635.1 | 58.618 | 1.049 |
| AD-1423627.1 | 39.571 | 1.802 |
| AD-1423622.1 | 68.706 | 5.484 |
| AD-1423615.1 | 73.172 | 2.722 |
| AD-1423610.1 | 77.593 | 4.672 |
| AD-1423603.1 | 78.427 | 1.977 |
| AD-1423596.1 | 57.492 | 3.179 |
| AD-1423591.1 | 45.113 | 3.474 |
| AD-1423586.1 | 33.432 | 2.164 |
| AD-1423581.1 | 49.109 | 1.564 |
| AD-1423574.1 | 25.494 | 2.343 |
| AD-1423568.1 | 39.863 | 2.065 |
| AD-1423563.1 | 59.684 | 4.892 |
| AD-1423559.1 | 60.529 | 3.187 |
| AD-1423554.1 | 78.139 | 5.377 |
| AD-1423540.1 | 59.912 | 4.805 |
| AD-1423534.1 | 81.287 | 5.576 |
| AD-1423529.1 | 89.715 | 5.711 |
| AD-1423523.1 | 14.507 | 0.206 |
| AD-1423517.1 | 20.748 | 2.013 |
| AD-1423512.1 | 27.544 | 1.273 |
| AD-1423507.1 | 37.435 | 1.368 |
| AD-1423498.1 | 69.424 | 5.969 |
| AD-1423493.1 | 49.072 | 5.028 |
| AD-1423485.1 | 65.529 | 3.276 |
| AD-1423470.1 | 42.272 | 1.967 |
| AD-1423464.1 | 27.971 | 2.580 |
| AD-1423459.1 | 47.512 | 2.820 |
| AD-1423452.1 | 27.247 | 1.206 |
| AD-1423464.1 | 94.710 | 5.279 |
| AD-1423459.1 | 93.372 | 5.536 |
| AD-1423452.1 | 90.040 | 4.598 |

### Example 3. In Vivo Screening of dsRNA Duplexes in Mice

[0749] siRNA molecules targeting the GPR75 gene, identified from the above in vitro studies, are evaluated in vivo.

[0750] For example, the siRNA molecules may be assessed for their ability to decrease GPR75 expression in a transgenic mouse overexpressing human GPR75. Alternatively, or in addition, suitable animal models of body weight disorders, such as obesity, may be used. Some examples of available models of body weight disorders include the leptin-deficient (ob/ob) mice, leptin receptor-deficient (db/db) mice and non-obese diabetic (NOD) mice (King A. Br J Pharmacol., 2012, 166(3): 877-894); diet-induced C57BL/6J mouse model (Vedova M D, et al., Nutr Metab Insights. 2016; 9: 93-102); or diet-induced ob/ob mouse models (Tolbol K S et al., World J Gastroenterol 2018, 2: 179). Many of the mouse models are commercially available from the Jackson Laboratory or Charles River.

[0751] The ability of selected dsRNA agents designed and assayed in Example 1 are assessed for their ability to reduce the level of GPR75 expression in these animal models and to treat a body weight disorder, such as obesity.

[0752] Briefly, littermates are subcutaneously or intrathecally administered a single 0.1 mg/kg, 1 mg/kg, 10 mg/kg, or 30 mg/kg dose of the dsRNA agents of interest, or a placebo. Body weight of the animals is monitored daily. Two weeks after administration, animals are sacrificed, blood and tissue samples, including cerebral cortex, spinal cord, liver, spleen, and cervical lymph nodes, are collected. Uptake of dsRNA in liver cells and/or neuronal cells and expression level of target gene in brains of treated mice are measured. Expression levels of GPR75 are further evaluated by in situ hybridization in mice. Body weight at sacrifice, glucose and lipid levels are further assessed.

### Example 4. In Vivo Screening of dsRNA Duplexes in Obese Mice

[0753] To assess the effect of duplexes targeting GPR75 to reduce the level of GPR75 mRNA in vivo, at Day 0, a single 150 μg dose of duplexes AD-1480250, AD-1481248, AD-1481278, or AD-1481773, or control was administered by intracerebroventricular injection to diet-induced obese mice. At day 21 post-administration, animals were sacrificed, cerebral cortex samples were collected, and the level of GPR75 mRNA was quantified by qPCR as described above.

[0754] The unmodified nucleotide sequences of the duplexes are provided in Table 5 and the modified nucleotide sequences of the duplexes are provided in Table 6. The unmodified sense and antisense strand nucleotide sequences of the control duplex are: 5′-GGGAGUCAAAGUUCUGUUUGA-3′ (SEO ID NO: 2735) and 5′-UCAAACAGAACUUUGACUCCCAU-3 (SEO ID NO: 2736). The modified sense and antisense strand nucleotide sequences of the control duplex are: 5′-gsgsgag(Uhd)CfaAfAfGfuucuguuusgsa-3′ (SEO ID NO: 2737) and 5′-VPusCfsaaaCfaGfAfacuuUfgAfcucccsasu-3′ (SEO ID NO: 2738).

[0755] As shown in FIG. 1, administration of AD-1480250, AD-1481248, AD-1481278, or AD-1481773 resulted in effective reduction in Gpr75 expression in brain which ranged from 0.63 to 0.87 fold of the expression levels observed with control siRNA administration.

TABLE 5
Unmodified Sense and Antisense
Strand GPR75 dsRNA Sequences

| Sense | | SEQ | Range in | Antisense | SEQ | Range in |
|---|---|---|---|---|---|---|
| Duplex | Sequence | ID | NM_ | Sequence | ID | NM_ |
| Name | 5′ to 3′ | NO: | 175490.4 | 5′ to 3′ | NO: | 175490.4 |
| AD- | UUCUGUCUCU | 2715 | 901-921 | UAACAACAUAC | 2719 | 899-921 |
| 1480250 | GUAUGUUGUU | | | AGAGACAGAAU | | |
| | A | | | G | | |
| AD- | UGGUUUCUUGA | 2716 | 2063-2083 | UCUUAAAAUGU | 2720 | 2061-2083 |
| 1481248 | CAUUUUAAGA | | | CAAGAAACCAU | | |
| | | | | G | | |
| AD- | AACUUCUACUC | 2717 | 2105-2125 | UCAUAGAUUAG | 2721 | 2103-2125 |
| 1481278 | UAAUCUAUGA | | | AGUAGAAGUUG | | |
| | | | | A | | |
| AD- | UCAGUCUAAUG | 2718 | 2708-2728 | UACAGCGAAAC | 2722 | 2706-2728 |
| 1481773 | UUUCGCUGUA | | | AUUAGACUGAG | | |
| | | | | C | | |

TABLE 6
Modified Sense and Antisense
Strand GPR75 dsRNA Sequences

| | | | | | mRNA | |
|---|---|---|---|---|---|---|
| | | SEQ | Antisense | | Target | SEQ |
| Duplex | Sense Sequence | ID | Sequence | | Sequence | ID |
| Name | 5′ to 3′ | NO: | 5′ to 3′ | | 5′ to 3′ | NO: |
| AD- | ususcug(Uhd)Cfu | 2723 | VPusAfsacaAfc | 2727 | CAUUCUGUCU | 2731 |
| 1480250 | CfUfGfuauguugus | | AfUfacagAfgAf | | CUGUAUGUUG | |
| | usa | | cagaasusg | | UUG | |
| AD- | usgsguu(Uhd)Cfu | 2724 | VPusCfsuuaAfa | 2728 | CAUGGUUUCU | 2732 |
| 1481248 | UfGfAfcauuuuaas | | AfUfgucaAfgAf | | UGACAUUUUA | |
| | gsa | | aaccasusg | | AGA | |
| AD- | asascuu(Chd)Ufa | 2725 | VPusCfsauaGfa | 2729 | UCAACUUCUA | 2733 |
| 1481278 | CfUfCfuaaucuausg | | UfUfagagUfaGf | | CUCUAAUCUAU | |
| | sa | | aaguusgsa | | GU | |
| AD- | uscsagu(Chd)Ufa | 2726 | VPusAfscagCfg | 2730 | GCUCAGUCUA | 2734 |
| 1481773 | AfUfGfuuucgcugsu | | AfAfacauUfaGf | | AUGUUUCGCUG | |
| | sa | | acugasgsc | | UG | |

INFORMAL SEQUENCE LISTING
>NM_006794.4 Homo sapiens G protein-coupled receptor 75 (GPR75), mRNA
SEQ ID NO: 1
GTCTTGCCGCGGCTCCCGGGATGCGCGGAGGCGGTGGCGATGGCGATGATGCCTCTAGTCCTGCATCATC
CAGAGCGGCAGGCGGAGCTGGGGTCCGGACTGCGAGATGGAGGAGGGGCGGCGCTGCGGCCACCCGGCAG
GCTTATCTGTCTTGGGCCTCTTTTGTCACATATTGCTCATCTGTGAGCTGAGGCCCTGACTCACTGAGTA
TTTTTGGGGAGCAGAAGAAGGAGACATTTCTCTCCGAAAATGAACTCAACAGGCCACCTTCAGGATGCCC
CCAATGCCACCTCGCTCCATGTGCCTCACTCACAGGAAGGAAACAGCACCTCTCTCCAGGAGGGTCTTCA
GGATCTCATCCACACAGCCACCTTGGTGACCTGTACTTTTCTACTGGCGGTCATCTTCTGCCTGGGTTCC
TATGGCAACTTCATTGTCTTCTTGTCCTTCTTCGATCCAGCCTTCAGGAAATTCAGAACCAACTTTGATT
TCATGATCCTGAACCTGTCCTTCTGTGACCTCTTCATTTGTGGAGTGACAGCCCCCATGTTCACCTTTGT
GTTATTCTTCAGCTCAGCCAGTAGTATCCCGGATGCTTTCTGCTTCACTTTCCATCTCACCAGTTCAGGC
TTCATCATCATGTCTCTGAAGACAGTGGCAGTGATCGCCCTGCACCGGCTCCGGATGGTGTTGGGGAAAC
AGCCTAATCGCACGGCCTCCTTTCCCTGCACCGTACTCCTCACCCTGCTTCTCTGGGCCACCAGTTTCAC
CCTTGCCACCTTGGCTACCTTGAAAACCAGCAAGTCCCACCTCTGTCTTCCCATGTCCAGTCTGATTGCT
GGAAAAGGGAAAGCCATTTTGTCTCTCTATGTGGTCGACTTCACCTTCTGTGTTGCTGTGGTCTCTGTCT
CTTACATCATGATTGCTCAGACCCTGCGGAAGAACGCTCAAGTCAGAAAGTGCCCCCCTGTAATCACAGT
CGATGCTTCCAGACCACAGCCTTTCATGGGGGTCCCTGTGCAGGGAGGTGGAGATCCCATCCAGTGTGCC
ATGCCGGCTCTGTATAGGAACCAGAATTACAACAAACTGCAGCACGTTCAGACCCGTGGATATACCAAGA
GTCCCAACCAACTGGTCACCCCTGCAGCAAGCCGACTCCAGCTCGTATCAGCCATCAACCTCTCCACTGC
CAAGGATTCCAAAGCCGTGGTCACCTGTGTGATCATTGTGCTGTCAGTCCTGGTGTGCTGTCTTCCACTG
GGGATTTCCTTGGTACAGGTGGTTCTCTCCAGCAATGGGAGCTTCATTCTTTACCAGTTTGAATTGTTTG
GATTTACTCTTATATTTTTCAAGTCAGGATTAAACCCTTTTATATATTCTCGGAACAGTGCAGGGCTGAG
AAGGAAAGTGCTCTGGTGCCTCCAATACATAGGCCTGGGTTTTTTCTGCTGCAAACAAAAGACTCGACTT
CGAGCCATGGGAAAAGGGAACCTCGAAGTCAACAGAAACAAATCCTCCCATCATGAAACAAACTCTGCCT
ACATGTTATCTCCAAAGCCACAGAAGAAATTTGTGGACCAGGCTTGTGGCCCAAGTCATTCAAAAGAAAG
TATGGTGAGTCCCAAGATCTCTGCTGGACATCAACACTGTGGTCAGAGCAGCTCGACCCCCATCAACACT
CGGATTGAACCTTACTACAGCATCTATAACAGCAGCCCTTCCCAGGAGGAGAGCAGCCCATGTAACTTAC
AGCCAGTAAACTCTTTTGGATTTGCCAATTCATATATTGCCATGCATTATCACACCACTAATGACTTAGT
GCAGGAATATGACAGCACTTCAGCCAAGCAGATTCCAGTCCCCTCCGTTTAAAGTCATGGAGGCTATAGG
ATCTTATGTAAACAGTTTTTGTTTCTGATAGTAATGGACTTTATTCTAACTTGAGATCAGTGGCGGATCA
AAACCTACAAGATTCAACTGAAAAGTTGGCAGTTATGGTTTTCTTTCATCTGATGTGTCAGTATCTGTTG
ATTTGCTTTGTAGTTTGTTGACATCTTAAGATTTGATGTGAAAGTTTTAGATTTTTTACCCTGC
>NM_175490.4 Mus musculus G protein-coupled receptor 75 (Gpr75), mRNA
SEQ ID NO: 2
AGAGGGAGGGGCCGCGCCCCGGGTTCGGTGACTGCGCCGCGCGCCCGGCTCGCCTAGGCTCCCGGGATGC
GCGGAGGCGGCAGCGATGGCGATGATGACTCTAGCCCGGCAGCTTCCAGGCCACCGGGCACAGATAGGGT
CACTACTGCGACACGGAGGAGGAAGGGCGGCGCTGAGGCCAGCTGGCTTATCTTCTTTGGCACATGCTCG
TCGTCTGTGAGCTGAGATCCTGACTCTTTTCCTGCTGAATTTATTTTTTTGAGAACACAAGAAAGAGACA
CCTCTCTCTGAAGATGAACACAAGTGCCCCGCTTCAGAATGTCCCCAATGCCACCTTGCTAAACATGCCT
CCCCTGCACGGGGGAAATAGCACTTCTCTCCAGGAAGGTCTTCGAGATTTTATCCACACAGCCACCTTGG
TGACCTGCACTTTTCTGCTTGCCATCATCTTCTGTCTAGGCTCTTATGGAAATTTTATTGTCTTCTTGTC
TTTCTTTGACCCATCCTTCAGGAAGTTCAGAACCAACTTTGATTTCATGATCTTGAACCTGTCTTTCTGT
GATCTGTTCATCTGTGGGGTCACAGCCCCCATGTTCACCTTCGTGCTGTTCTTCAGCTCAGCCAGTAGCA
TCCCAGATAGCTTCTGCTTCACCTTCCACCTTACCAGCTCAGGCTTCGTCATCATGTCCCTCAAGATGGT
GGCTGTGATTGCTCTGCACCGGCTCCGGATGGTGATGGGGAAGCAGCCTAATTGTACAGCCTCCTTTTCC
TGCATCTTGCTCCTTACCCTTCTTCTCTGGGCGACCAGCTTTACACTTGCCACCTTGGCTACACTGAGAA
CCAATAAGTCCCACCTGTGTCTCCCCATGTCCAGTCTTATGGATGGGGAAGGGAAAGCCATTCTGTCTCT
GTATGTTGTTGACTTTACCTTCTGTGTTGCTGTGGTGTCTGTCTCTTATATTATGATTGCTCAAACCCTT
CGGAAAAATGCTCAAGTAAAAAAGTGCCCCCCGGTGATCACAGTTGATGCTTCCAGACCACAGCCATTCA
TGGGGGCCTCTGTGAAGGGAAATGGAGATCCCATCCAGTGCACCATGCCAGCTCTGTATAGGAACCAGAA
TTATAACAAACTGCAGCACAGTCAAACTCATGGATACACTAAGAATATCAACCAGATGCCAATCCCCTCA
GCCAGTCGACTCCAGCTGGTATCAGCCATCAACTTCTCTACTGCCAAGGATTCCAAAGCCGTGGTCACCT
GTGTGGTCATCGTGTTGTCAGTCCTGGTGTGCTGTCTTCCTCTTGGGATTTCCCTGGTGCAAATGGTTCT
GTCTGACAATGGCAGTTTTATCCTTTACCAGTTTGAACTGTTTGGATTTACTCTGATATTTTTCAAGTCA
GGATTAAATCCTTTTATATATTCTCGGAACAGTGCTGGGCTGAGAAGGAAAGTACTCTGGTGCCTGAGAT
ACACTGGCCTGGGCTTTCTCTGCTGCAAACAGAAAACTCGACTTCGGGCCATGGGAAAAGGGAACCTTGA
AATCAATAGAAACAAATCTTCTCATCATGAGACAAACTCTGCCTACATGCTGTCTCCAAAACCACAGAGA
AAATTTGTGGACCAGGCTTGTGGCCCAAGTCACTCAAAGGAAAGTGCAGCGAGTCCCAAAGTTTCTGCTG
GACATCAACCCTGTGGTCAAAGCAGTTCCACACCCATCAACACTAGGATTGAACCTTACTATAGCATCTA
TAACAGCAGCCCTTCCCAGCAGGAGAGCGGTCCGGCAAACTTGCCTCCAGTGAACTCTTTTGGGTTTGCC
AGTTCCTACATCGCCATGCACTATTACACCACCAATGATTTGATGCAGGAATATGACAGCACGTCAGCAA
AACAAATTCCTATCCCCTCTGTTTAACATGGCCAGCGAGTCTGGAGGGAATGGTTTTCTATTCTAACTAA
GCAAGCCTTTAAAAGAGTTTGCAAAGCAAAACCTGGACTCAACTGAACACTTGACAATTTGATTTTCTTT
TGTTTATAATATTAGTATCTGGGTTGGCTTCATGGTTTCTTGACATTTTAAGATTTGATGTAAAAGTTTA
TTTCAACTTCTACTCTAATCTATGTCCCAATACTTTATATTAAACTGCTAAGAAGATGCTAGGATCTATC
CTACTGATGACCTTTTAAGTCAGTATTATGGGACTTTAGATATGTATTGGCTACATTTTCTTTCTTTCCA
TTTATTTATTTACTCACTTTATATCCTGATTGAAGCCCCACCTCTCCTCCCAGTACCCGCTCACATGGCC
CTTCTCCCAATTCCTACTACCCTTTATTTCTGAAAAGGGGGAGGTTCCTCCTGGGTAACCAACCCACCCT
GGCACCTCAAGTCACTGCAGGACTAGGTATATCCTCTGCCACTAAGGCCAGACATGGCAGCCCAATTACG
GGAGCAGGATTCACAGACAGGAAATAGAGTCAGGGACAACCACTGCTCTATTTGTTGGGAGACCCACATG
AAGACCAAGCTGTTACAAATGTGCTGGTGAGCCTAGGTCCAGCTCATATGTGCTCTTTAGTTGGTGGTTC
AGTCTCTGGGAGCCTTCAAGGGTCAGGTTAGTTGCCTCTGTTGGTATTCTGAAGGGGTACCTATTCCCTC
CAGGTTCCTCAATCCTTCCCCCAACTCATTCACAAGACTTCCCAGGCTCAGTCTAATGTTTCGCTGTGGT
ACTCTGCATCTGTTTCTGTCAACTGCTATAATTTGGCTACATTTTTTAAAATGTGTTTGAAAAAAAAATG
ATCTTTCTGAAGTGTTATTTTTATAAAAATATGGAATTTGTGTTTTTGAAGTACTGAAACAGCAAACAGT
GTACTTTTTTTGGTGGCAAGTGATTTAAATAAAAAACTTACTATTAAAGCAAAAAAAAAAAAAAAAAA
>NM_001109096.1 Rattus norvegicus G protein-coupled receptor 75 (Gpr75),
mRNA
SEQ ID NO: 3
ATGAATTCAAGTGCCCCGCTTCAGAATGTTCCCAATGCCACCTTGCTATACACACCTCCCCTGCAGGGAG
GAAATAACACTTCTCTCCAGGAGGGTCTTCGAGATTTTATCCACACAGCCACCTTGGTGACCTGCACGGT
CCTGCTTGCCATCATCTTCTGTCTAGGCTCTTATGGAAATTTTATTGTCTTCTTGTCTTTCTTTGACCCG
GCCTTCAGAAAGTTCAGAACTAACTTTGATTTCATGATCTTGAACCTGTCTTTCTGTGATCTGTTCATCT
GTGGGGCCACAGCCCCCATGTTCACCTTTGTGCTGTTCTTCAGCTCAGCCAGGAGCATCCCAGACAGTTT
CTGCTTCACCTTCCACCTTACCAGCTCAGGTTTCATCATCATGTCCCTCAAGATGGTAGCTGTGATTGCC
CTGCACCGGCTCCGGATGGTGATGGGGAAGCAGCCTAATTGCACCGCTTCCTTTTCCTGCATCTTGCTCC
TTACCCTTCTTCTCTGGGCCACCAGCTTTACACTTGCCACCTTGGCTACACTGAGAACCAGTAAGTCCCA
CCTGTGTCTCCCCATGTCCAGTCTTATGGACGGGGAAGGGAAGGCCATTCTGTCTCTGTATGTTGTTGAC
TTTACCTTCTGTGTGGCCGTGGTGTCTGTCTCTTATATCATGATTGCTCAAACCCTTCGGAAGAATGCCC
AAGTAAAAAAGTGCCCCCCTGTGATCACAGTTGATGCTTCCAGACCACAGCCATTCATGGGGGCCTCTGT
GAAGGGAAATGGAGATCCCATCCAGTGCACCATGCCAGCTCTGTATAGGAACCAGAATTATAACAAACTG
CAGCACAATCAAACTCATGGATACACTAAGAATGCCAACCAGATGCCAATCCCCTCAGCCAGTCGGCTCC
AGCTGGTATCAGCGGTCAACCTCTCTACTGCCAAGGATTCCAAAGCTGTGGTCACCTGCATGGTCATCGT
GTTGTCGGTTCTAGTGTGCTGTCTTCCTCTGGGGATTTCCCTGCTGCAAGTGGTTCTGTCTGACAGTGGC
AGCTTCATCCTTTACCAGTTTGAGTTATTTGGATTTACTCTGATATTTTTCAAGTCAGGATTAAATCCTT
TTATATATTCTCGGAACAGTGCTGGGCTGAGAAGGAAAGTGCTCTGGTGCCTGCGATACACTGGCCTGGG
CTTCCTCTGCTGCAAACAGAAAACTCGACTTCGGGCCATGGGGAAAGGGAACCTTGAAATCAATAGAAAC
AAATCCTCCCATCATGAGACAAACTCTGCCTACATGCTGTCTCCAAAACCACAGAAGAAATTTGTAGACC
AGGCTTGTGGCCCAAGTCATTCAAAAGAAAGTGTAGCAAGTCCCAAAGTCTCTGCTGGACATCACCCCTG
TGGGCAGAGCAGCTCGACACCCATCAACACTCGGATTGAACCTTACTATAGCATCTATAACAGCAGCCCG
TCCCAGCAGGAGAGCAGCCCAGCAAACCTGCAGCCAGTGAACTCTTTTGGTTTCGCCAGTTCCTACATCG
CCATGCACTATTACACCACCAATGACTTGATGCAGGACTATGACAGCACGTCGGCAAAACAGATCCCTAT
CCCTTCTGTTTAATACAGCCAGAGAATCTGGAGGGAATGGTTTTCTCTCTGGACTGAACAAACCTTTAAA
AGAGCTTGAGTTCCATGGCAAAACAAAACCTGGAATCAACTGAAGACTTGACTTTCTTTCACCTGAAGTA
TTAGTATCCGGGTTGGCTTCATGGTTTCTTGACATTTTAAGATTTAGTGTAAAAGTTTAGTTCAATTTAT
ACTCTGACCCATGTCCCAATACTTTATACTAAACTGCTAAAAAGATGTCAGGGACTATTCTATTAATGAC
ACCCTTTTAAGTCAGTATTATGGGATTTTAGATATGTATTGACTACATTTTCTTTCTTTCCACTAATTTA
TTTATTTATTCACTTTACATCCCGATTGAAGCCCCACCTCTCCTCCCAGTACTCCCTCTCATGGTCCCTC
TCCCAATTTCTCCTCCCCTTTATTTCTGAGGAGGAGGAGGTCCCTCCTGGGGAAACAACCTTCCTCAAGT
CACTGAAGGACTAGGTACATCCTCTGCCACTGAGGCCAGACGTGCTAGCCCAATTAGGAGCAGGATTCAC
AGACAGGAAACAGTCAGGGACAGTCAGCACTCTACTCATTGGGGGACCCATATAAAGACCAAGCTGCACC
TCTGTTACAAATGTGCTGGTGGGCCTAGGACCAGCCTCTTTGGCTAGTGGTTCAGTACCTGGGAGCCTTC
AAGGATCCAGGTTAGTTGGTATTCTGAAGGAGTACCTGTTCCCTCCAGGTTCCTCTATCCTTTCTCCAAC
CCTTCCACAAGACTTCCCAAGCTCCAGTCTAATGTTTGGCTGTGGGACTGCATTTGTTTCTGTCAACTGC
TGTAATTTGGCTACATTTTTAAAATGGTGTTTGAAAAAAATTATCTTTCTGAAGTGTTATTTTTATAAAA
ATATGGAATTAGTGTCTTTGAAGTACTGAAACAGCAAACAGTGTACTTTTTTGGTGGCAAGTGGTTTAAA
TAAAAAACTTACTGTTAAAA
>NM_001204509.2 Macaca mulatta G protein-coupled receptor 75 (GPR75), mRNA
SEQ ID NO: 4
AGGCCCGGTGTCCGGCAGAGGGGGCGGTGCCCTGGGCGTCTCCGTGACTGCGCCTCTGCGCCCGCGTCTT
GCCGCGGCTCCCGGGATGCGCGGAGGCGGTGGCGATGGCGATGATGCCTGTAGTCCTGCATCATCCGGAG
CGGCAGGCGGAGCTGGGGTCCGGACTGCGAGATGGAGGAGGAGGGGAGGCGCTACGGCCACCTGGCAGGC
TCATCTGCCTTGGGCCTCTTTTGTCACATATTGTTCATATTGTTCGTCTGTGAGCTGAGGTCCTGACTCA
CTGAGTGTTTTTGGGGAGCAGAAGAAGGAGACATTTCTCTCTGAAGATGAACTCAACAGGCCACCTTCAA
GATGCCCCCAATGCCACCTCGCTCCATGTGCCTCACTCACCAGAAGGAAACAGCACCTCTCTCCAGGAGG
GTCTTCAGGATCTCATCCACACAGCCACCTTGGTGACCTGTACTTTTCTACTGGCGGTCATCTTCTGCCT
GGGTTCCTACGGCAACTTCATTGTCTTCTTGTCCTTCTTCGATCCAGCCTTCAGGAAATTTAGAACCAAC
TTTGATTTCATGATCCTGAACCTGTCCTTCTGTGACCTCTTCATTTGTGGAGTGACGGCACCCATGTTCA
CCTTTGTGTTATTCTTCAGCTCAGCCAGTAGTATCCCAGATGCTTTCTGCTTCACTTTCCATCTCACCAG
TTCCGGCTTCATCATCATGTCCCTGAAGACAGTGGCAGTGATTGCCCTGCACCGGCTCCGCATGGTGTTG
GGGAAGCAACCTAATCGCATGGCCTCGTTTCCCTGCACCGTCCTCCTCACCCTGCTTCTCTGGGCCACCA
GCTTCACCCTTGCCACCTTGGCTACCTTGAAAACCAGCAAGTCCCACCTCTGTCTTCCCATGTCCAGTCT
GATTGCTGGAAAAGGGAAAGCCATTTTGTCTCTCTATGTGGTCGACTTCACCTTCTGTGTTGCTGTGGTC
TCTGTCTCTTACATCATGATTGCTCAGACCCTGCGGAAGAACGCTCAAGTCAGAAAGTGTCCCCCTGTAA
TCACAGTCGATGCTTCCAGACCACAGCCTTTCATGGGGGTCCCTGTGCAGGGAGGTGGAGATCCCATCCA
GTGTGCCATGCCGGCTCTGTATAGGAACCAGAATTACAACAAACTGCAGCACGTTCAGACCCGTGGATAT
ACCAAGAGTCCCAACCAGCTGGCCACCCCTGCAGCGAGCCGACTCCAGCTGGTATCAGCCATCAACCTCT
CCACTGCCAAGGATTCCAAAGCCGTGGTCACCTGCGTGATCATTGTGCTGTCAGTCCTGGTGTGCTGTCT
TCCACTGGGGATCTCCTTGGTACAGGTGGTTCTCTCCAGCAATGGGAGCTTCATTCTTTACCAGTTTGAA
TTGTTTGGATTTACCCTTATATTTTTCAAGTCAGGATTAAACCCTTTTATATATTCTCGGAACAGTGCAG
GGCTGAGAAGGAAAGTGCTCTGGTGCCTCCAGTACATAGGCCTGGGTTTTTTCTGCTGCAAACAAAAGAC
TCGACTTCGAGCCATGGGAAAAGGGAACCTCGAAGTCAACAGAAACAAATCCTCCCATCATGAAACAAAC
TCTGCCTACATGTTATCTCCAAAGCCACAGAAGAAATTTGTGGACCAGGCTTGTGGCCCAAGTCATTCAA
AGGAAAGTGTGGTGAGTCCCAAGATCTCTGCTGGACATCAACACTGTGGTCAGAGCAGCTCAACCCCCAT
CAACACTCGAATTGAACCTTACTACAGCATCTATAACAGCAGCCCTTCCCAGGAGGAGAGCAGCCCATGT
AACTTACAGCCAGTAAACTCTTTTGGATTTGCCAATTCATATATTGCCATGCATTATCACACCACTAATG
ACTTAATGCAGGAATATGACAGCACTTCAGCCAAGCAGATTCCAGTTCCCTCTGTTTAAAGTCACTGAGG
CTATAGGATCTTATTTTTGTTTCTGATACTAATGGACTTTCTTCTAACTTTGAGTTCAGTGACGGATCAA
AACCTAAAAGATTCAACTGAAAAGTTGGCAGTTATGGTTTTCTTTCGTCTGATGTGTCAGTATGTGTTGA
TTTGCTTTGTAGTTTGTTGACATCTTAAGATTTGATGTGAAAGTTTTAGATTTTTACCTTG
Reverse Complement of SEQ ID NO: 1
SEQ ID NO: 5
GCAGGGTAAAAAATCTAAAACTTTCACATCAAATCTTAAGATGTCAACAAACTACAAAGCAAATCAACAGATACT
GACACATCAGATGAAAGAAAACCATAACTGCCAACTTTTCAGTTGAATCTTGTAGGTTTTGATCCGCCACTGATC
TCAAGTTAGAATAAAGTCCATTACTATCAGAAACAAAAACTGTTTACATAAGATCCTATAGCCTCCATGACTTTA
AACGGAGGGGACTGGAATCTGCTTGGCTGAAGTGCTGTCATATTCCTGCACTAAGTCATTAGTGGTGTGATAATG
CATGGCAATATATGAATTGGCAAATCCAAAAGAGTTTACTGGCTGTAAGTTACATGGGCTGCTCTCCTCCTGGGA
AGGGCTGCTGTTATAGATGCTGTAGTAAGGTTCAATCCGAGTGTTGATGGGGGTCGAGCTGCTCTGACCACAGTG
TTGATGTCCAGCAGAGATCTTGGGACTCACCATACTTTCTTTTGAATGACTTGGGCCACAAGCCTGGTCCACAAA
TTTCTTCTGTGGCTTTGGAGATAACATGTAGGCAGAGTTTGTTTCATGATGGGAGGATTTGTTTCTGTTGACTTC
GAGGTTCCCTTTTCCCATGGCTCGAAGTCGAGTCTTTTGTTTGCAGCAGAAAAAACCCAGGCCTATGTATTGGAG
GCACCAGAGCACTTTCCTTCTCAGCCCTGCACTGTTCCGAGAATATATAAAAGGGTTTAATCCTGACTTGAAAAA
TATAAGAGTAAATCCAAACAATTCAAACTGGTAAAGAATGAAGCTCCCATTGCTGGAGAGAACCACCTGTACCAA
GGAAATCCCCAGTGGAAGACAGCACACCAGGACTGACAGCACAATGATCACACAGGTGACCACGGCTTTGGAATC
CTTGGCAGTGGAGAGGTTGATGGCTGATACGAGCTGGAGTCGGCTTGCTGCAGGGGTGACCAGTTGGTTGGGACT
CTTGGTATATCCACGGGTCTGAACGTGCTGCAGTTTGTTGTAATTCTGGTTCCTATACAGAGCCGGCATGGCACA
CTGGATGGGATCTCCACCTCCCTGCACAGGGACCCCCATGAAAGGCTGTGGTCTGGAAGCATCGACTGTGATTAC
AGGGGGGCACTTTCTGACTTGAGCGTTCTTCCGCAGGGTCTGAGCAATCATGATGTAAGAGACAGAGACCACAGC
AACACAGAAGGTGAAGTCGACCACATAGAGAGACAAAATGGCTTTCCCTTTTCCAGCAATCAGACTGGACATGGG
AAGACAGAGGTGGGACTTGCTGGTTTTCAAGGTAGCCAAGGTGGCAAGGGTGAAACTGGTGGCCCAGAGAAGCAG
GGTGAGGAGTACGGTGCAGGGAAAGGAGGCCGTGCGATTAGGCTGTTTCCCCAACACCATCCGGAGCCGGTGCAG
GGCGATCACTGCCACTGTCTTCAGAGACATGATGATGAAGCCTGAACTGGTGAGATGGAAAGTGAAGCAGAAAGC
ATCCGGGATACTACTGGCTGAGCTGAAGAATAACACAAAGGTGAACATGGGGGCTGTCACTCCACAAATGAAGAG
GTCACAGAAGGACAGGTTCAGGATCATGAAATCAAAGTTGGTTCTGAATTTCCTGAAGGCTGGATCGAAGAAGGA
CAAGAAGACAATGAAGTTGCCATAGGAACCCAGGCAGAAGATGACCGCCAGTAGAAAAGTACAGGTCACCAAGGT
GGCTGTGTGGATGAGATCCTGAAGACCCTCCTGGAGAGAGGTGCTGTTTCCTTCCTGTGAGTGAGGCACATGGAG
CGAGGTGGCATTGGGGGCATCCTGAAGGTGGCCTGTTGAGTTCATTTTCGGAGAGAAATGTCTCCTTCTTCTGCT
CCCCAAAAATACTCAGTGAGTCAGGGCCTCAGCTCACAGATGAGCAATATGTGACAAAAGAGGCCCAAGACAGAT
AAGCCTGCCGGGTGGCCGCAGCGCCGCCCCTCCTCCATCTCGCAGTCCGGACCCCAGCTCCGCCTGCCGCTCTGG
ATGATGCAGGACTAGAGGCATCATCGCCATCGCCACCGCCTCCGCGCATCCCGGGAGCCGCGGCAAGAC
Reverse Complement of SEQ ID NO: 2
SEQ ID NO: 6
TTTTTTTTTTTTTTTTTTGCTTTAATAGTAAGTTTTTTATTTAAATCACTTGCCACCAAAAAAAGTACACTGTTT
GCTGTTTCAGTACTTCAAAAACACAAATTCCATATTTTTATAAAAATAACACTTCAGAAAGATCATTTTTTTTTC
AAACACATTTTAAAAAATGTAGCCAAATTATAGCAGTTGACAGAAACAGATGCAGAGTACCACAGCGAAACATTA
GACTGAGCCTGGGAAGTCTTGTGAATGAGTTGGGGGAAGGATTGAGGAACCTGGAGGGAATAGGTACCCCTTCAG
AATACCAACAGAGGCAACTAACCTGACCCTTGAAGGCTCCCAGAGACTGAACCACCAACTAAAGAGCACATATGA
GCTGGACCTAGGCTCACCAGCACATTTGTAACAGCTTGGTCTTCATGTGGGTCTCCCAACAAATAGAGCAGTGGT
TGTCCCTGACTCTATTTCCTGTCTGTGAATCCTGCTCCCGTAATTGGGCTGCCATGTCTGGCCTTAGTGGCAGAG
GATATACCTAGTCCTGCAGTGACTTGAGGTGCCAGGGTGGGTTGGTTACCCAGGAGGAACCTCCCCCTTTTCAGA
AATAAAGGGTAGTAGGAATTGGGAGAAGGGCCATGTGAGCGGGTACTGGGAGGAGAGGTGGGGCTTCAATCAGGA
TATAAAGTGAGTAAATAAATAAATGGAAAGAAAGAAAATGTAGCCAATACATATCTAAAGTCCCATAATACTGAC
TTAAAAGGTCATCAGTAGGATAGATCCTAGCATCTTCTTAGCAGTTTAATATAAAGTATTGGGACATAGATTAGA
GTAGAAGTTGAAATAAACTTTTACATCAAATCTTAAAATGTCAAGAAACCATGAAGCCAACCCAGATACTAATAT
TATAAACAAAAGAAAATCAAATTGTCAAGTGTTCAGTTGAGTCCAGGTTTTGCTTTGCAAACTCTTTTAAAGGCT
TGCTTAGTTAGAATAGAAAACCATTCCCTCCAGACTCGCTGGCCATGTTAAACAGAGGGGATAGGAATTTGTTTT
GCTGACGTGCTGTCATATTCCTGCATCAAATCATTGGTGGTGTAATAGTGCATGGCGATGTAGGAACTGGCAAAC
CCAAAAGAGTTCACTGGAGGCAAGTTTGCCGGACCGCTCTCCTGCTGGGAAGGGCTGCTGTTATAGATGCTATAG
TAAGGTTCAATCCTAGTGTTGATGGGTGTGGAACTGCTTTGACCACAGGGTTGATGTCCAGCAGAAACTTTGGGA
CTCGCTGCACTTTCCTTTGAGTGACTTGGGCCACAAGCCTGGTCCACAAATTTTCTCTGTGGTTTTGGAGACAGC
ATGTAGGCAGAGTTTGTCTCATGATGAGAAGATTTGTTTCTATTGATTTCAAGGTTCCCTTTTCCCATGGCCCGA
AGTCGAGTTTTCTGTTTGCAGCAGAGAAAGCCCAGGCCAGTGTATCTCAGGCACCAGAGTACTTTCCTTCTCAGC
CCAGCACTGTTCCGAGAATATATAAAAGGATTTAATCCTGACTTGAAAAATATCAGAGTAAATCCAAACAGTTCA
AACTGGTAAAGGATAAAACTGCCATTGTCAGACAGAACCATTTGCACCAGGGAAATCCCAAGAGGAAGACAGCAC
ACCAGGACTGACAACACGATGACCACACAGGTGACCACGGCTTTGGAATCCTTGGCAGTAGAGAAGTTGATGGCT
GATACCAGCTGGAGTCGACTGGCTGAGGGGATTGGCATCTGGTTGATATTCTTAGTGTATCCATGAGTTTGACTG
TGCTGCAGTTTGTTATAATTCTGGTTCCTATACAGAGCTGGCATGGTGCACTGGATGGGATCTCCATTTCCCTTC
ACAGAGGCCCCCATGAATGGCTGTGGTCTGGAAGCATCAACTGTGATCACCGGGGGGCACTTTTTTACTTGAGCA
TTTTTCCGAAGGGTTTGAGCAATCATAATATAAGAGACAGACACCACAGCAACACAGAAGGTAAAGTCAACAACA
TACAGAGACAGAATGGCTTTCCCTTCCCCATCCATAAGACTGGACATGGGGAGACACAGGTGGGACTTATTGGTT
CTCAGTGTAGCCAAGGTGGCAAGTGTAAAGCTGGTCGCCCAGAGAAGAAGGGTAAGGAGCAAGATGCAGGAAAAG
GAGGCTGTACAATTAGGCTGCTTCCCCATCACCATCCGGAGCCGGTGCAGAGCAATCACAGCCACCATCTTGAGG
GACATGATGACGAAGCCTGAGCTGGTAAGGTGGAAGGTGAAGCAGAAGCTATCTGGGATGCTACTGGCTGAGCTG
AAGAACAGCACGAAGGTGAACATGGGGGCTGTGACCCCACAGATGAACAGATCACAGAAAGACAGGTTCAAGATC
ATGAAATCAAAGTTGGTTCTGAACTTCCTGAAGGATGGGTCAAAGAAAGACAAGAAGACAATAAAATTTCCATAA
GAGCCTAGACAGAAGATGATGGCAAGCAGAAAAGTGCAGGTCACCAAGGTGGCTGTGTGGATAAAATCTCGAAGA
CCTTCCTGGAGAGAAGTGCTATTTCCCCCGTGCAGGGGAGGCATGTTTAGCAAGGTGGCATTGGGGACATTCTGA
AGCGGGGCACTTGTGTTCATCTTCAGAGAGAGGTGTCTCTTTCTTGTGTTCTCAAAAAAATAAATTCAGCAGGAA
AAGAGTCAGGATCTCAGCTCACAGACGACGAGCATGTGCCAAAGAAGATAAGCCAGCTGGCCTCAGCGCCGCCCT
TCCTCCTCCGTGTCGCAGTAGTGACCCTATCTGTGCCCGGTGGCCTGGAAGCTGCCGGGCTAGAGTCATCATCGC
CATCGCTGCCGCCTCCGCGCATCCCGGGAGCCTAGGCGAGCCGGGCGCGCGGCGCAGTCACCGAACCCGGGGCGC
GGCCCCTCCCTCT
Reverse Complement of SEQ ID NO: 3
SEQ ID NO: 7
TTTTAACAGTAAGTTTTTTATTTAAACCACTTGCCACCAAAAAAGTACACTGTTTGCTGTTTCAGTACTTCAAAG
ACACTAATTCCATATTTTTATAAAAATAACACTTCAGAAAGATAATTTTTTTCAAACACCATTTTAAAAATGTAG
CCAAATTACAGCAGTTGACAGAAACAAATGCAGTCCCACAGCCAAACATTAGACTGGAGCTTGGGAAGTCTTGTG
GAAGGGTTGGAGAAAGGATAGAGGAACCTGGAGGGAACAGGTACTCCTTCAGAATACCAACTAACCTGGATCCTT
GAAGGCTCCCAGGTACTGAACCACTAGCCAAAGAGGCTGGTCCTAGGCCCACCAGCACATTTGTAACAGAGGTGC
AGCTTGGTCTTTATATGGGTCCCCCAATGAGTAGAGTGCTGACTGTCCCTGACTGTTTCCTGTCTGTGAATCCTG
CTCCTAATTGGGCTAGCACGTCTGGCCTCAGTGGCAGAGGATGTACCTAGTCCTTCAGTGACTTGAGGAAGGTTG
TTTCCCCAGGAGGGACCTCCTCCTCCTCAGAAATAAAGGGGAGGAGAAATTGGGAGAGGGACCATGAGAGGGAGT
ACTGGGAGGAGAGGTGGGGCTTCAATCGGGATGTAAAGTGAATAAATAAATAAATTAGTGGAAAGAAAGAAAATG
TAGTCAATACATATCTAAAATCCCATAATACTGACTTAAAAGGGTGTCATTAATAGAATAGTCCCTGACATCTTT
TTAGCAGTTTAGTATAAAGTATTGGGACATGGGTCAGAGTATAAATTGAACTAAACTTTTACACTAAATCTTAAA
ATGTCAAGAAACCATGAAGCCAACCCGGATACTAATACTTCAGGTGAAAGAAAGTCAAGTCTTCAGTTGATTCCA
GGTTTTGTTTTGCCATGGAACTCAAGCTCTTTTAAAGGTTTGTTCAGTCCAGAGAGAAAACCATTCCCTCCAGAT
TCTCTGGCTGTATTAAACAGAAGGGATAGGGATCTGTTTTGCCGACGTGCTGTCATAGTCCTGCATCAAGTCATT
GGTGGTGTAATAGTGCATGGCGATGTAGGAACTGGCGAAACCAAAAGAGTTCACTGGCTGCAGGTTTGCTGGGCT
GCTCTCCTGCTGGGACGGGCTGCTGTTATAGATGCTATAGTAAGGTTCAATCCGAGTGTTGATGGGTGTCGAGCT
GCTCTGCCCACAGGGGTGATGTCCAGCAGAGACTTTGGGACTTGCTACACTTTCTTTTGAATGACTTGGGCCACA
AGCCTGGTCTACAAATTTCTTCTGTGGTTTTGGAGACAGCATGTAGGCAGAGTTTGTCTCATGATGGGAGGATTT
GTTTCTATTGATTTCAAGGTTCCCTTTCCCCATGGCCCGAAGTCGAGTTTTCTGTTTGCAGCAGAGGAAGCCCAG
GCCAGTGTATCGCAGGCACCAGAGCACTTTCCTTCTCAGCCCAGCACTGTTCCGAGAATATATAAAAGGATTTAA
TCCTGACTTGAAAAATATCAGAGTAAATCCAAATAACTCAAACTGGTAAAGGATGAAGCTGCCACTGTCAGACAG
AACCACTTGCAGCAGGGAAATCCCCAGAGGAAGACAGCACACTAGAACCGACAACACGATGACCATGCAGGTGAC
CACAGCTTTGGAATCCTTGGCAGTAGAGAGGTTGACCGCTGATACCAGCTGGAGCCGACTGGCTGAGGGGATTGG
CATCTGGTTGGCATTCTTAGTGTATCCATGAGTTTGATTGTGCTGCAGTTTGTTATAATTCTGGTTCCTATACAG
AGCTGGCATGGTGCACTGGATGGGATCTCCATTTCCCTTCACAGAGGCCCCCATGAATGGCTGTGGTCTGGAAGC
ATCAACTGTGATCACAGGGGGGCACTTTTTTACTTGGGCATTCTTCCGAAGGGTTTGAGCAATCATGATATAAGA
GACAGACACCACGGCCACACAGAAGGTAAAGTCAACAACATACAGAGACAGAATGGCCTTCCCTTCCCCGTCCAT
AAGACTGGACATGGGGAGACACAGGTGGGACTTACTGGTTCTCAGTGTAGCCAAGGTGGCAAGTGTAAAGCTGGT
GGCCCAGAGAAGAAGGGTAAGGAGCAAGATGCAGGAAAAGGAAGCGGTGCAATTAGGCTGCTTCCCCATCACCAT
CCGGAGCCGGTGCAGGGCAATCACAGCTACCATCTTGAGGGACATGATGATGAAACCTGAGCTGGTAAGGTGGAA
GGTGAAGCAGAAACTGTCTGGGATGCTCCTGGCTGAGCTGAAGAACAGCACAAAGGTGAACATGGGGGCTGTGGC
CCCACAGATGAACAGATCACAGAAAGACAGGTTCAAGATCATGAAATCAAAGTTAGTTCTGAACTTTCTGAAGGC
CGGGTCAAAGAAAGACAAGAAGACAATAAAATTTCCATAAGAGCCTAGACAGAAGATGATGGCAAGCAGGACCGT
GCAGGTCACCAAGGTGGCTGTGTGGATAAAATCTCGAAGACCCTCCTGGAGAGAAGTGTTATTTCCTCCCTGCAG
GGGAGGTGTGTATAGCAAGGTGGCATTGGGAACATTCTGAAGCGGGGCACTTGAATTCAT
Reverse Complement of SEQ ID NO: 4
SEQ ID NO: 8
CAAGGTAAAAATCTAAAACTTTCACATCAAATCTTAAGATGTCAACAAACTACAAAGCAAATCAACACATACTGA
CACATCAGACGAAAGAAAACCATAACTGCCAACTTTTCAGTTGAATCTTTTAGGTTTTGATCCGTCACTGAACTC
AAAGTTAGAAGAAAGTCCATTAGTATCAGAAACAAAAATAAGATCCTATAGCCTCAGTGACTTTAAACAGAGGGA
ACTGGAATCTGCTTGGCTGAAGTGCTGTCATATTCCTGCATTAAGTCATTAGTGGTGTGATAATGCATGGCAATA
TATGAATTGGCAAATCCAAAAGAGTTTACTGGCTGTAAGTTACATGGGCTGCTCTCCTCCTGGGAAGGGCTGCTG
TTATAGATGCTGTAGTAAGGTTCAATTCGAGTGTTGATGGGGGTTGAGCTGCTCTGACCACAGTGTTGATGTCCA
GCAGAGATCTTGGGACTCACCACACTTTCCTTTGAATGACTTGGGCCACAAGCCTGGTCCACAAATTTCTTCTGT
GGCTTTGGAGATAACATGTAGGCAGAGTTTGTTTCATGATGGGAGGATTTGTTTCTGTTGACTTCGAGGTTCCCT
TTTCCCATGGCTCGAAGTCGAGTCTTTTGTTTGCAGCAGAAAAAACCCAGGCCTATGTACTGGAGGCACCAGAGC
ACTTTCCTTCTCAGCCCTGCACTGTTCCGAGAATATATAAAAGGGTTTAATCCTGACTTGAAAAATATAAGGGTA
AATCCAAACAATTCAAACTGGTAAAGAATGAAGCTCCCATTGCTGGAGAGAACCACCTGTACCAAGGAGATCCCC
AGTGGAAGACAGCACACCAGGACTGACAGCACAATGATCACGCAGGTGACCACGGCTTTGGAATCCTTGGCAGTG
GAGAGGTTGATGGCTGATACCAGCTGGAGTCGGCTCGCTGCAGGGGTGGCCAGCTGGTTGGGACTCTTGGTATAT
CCACGGGTCTGAACGTGCTGCAGTTTGTTGTAATTCTGGTTCCTATACAGAGCCGGCATGGCACACTGGATGGGA
TCTCCACCTCCCTGCACAGGGACCCCCATGAAAGGCTGTGGTCTGGAAGCATCGACTGTGATTACAGGGGGACAC
TTTCTGACTTGAGCGTTCTTCCGCAGGGTCTGAGCAATCATGATGTAAGAGACAGAGACCACAGCAACACAGAAG
GTGAAGTCGACCACATAGAGAGACAAAATGGCTTTCCCTTTTCCAGCAATCAGACTGGACATGGGAAGACAGAGG
TGGGACTTGCTGGTTTTCAAGGTAGCCAAGGTGGCAAGGGTGAAGCTGGTGGCCCAGAGAAGCAGGGTGAGGAGG
ACGGTGCAGGGAAACGAGGCCATGCGATTAGGTTGCTTCCCCAACACCATGCGGAGCCGGTGCAGGGCAATCACT
GCCACTGTCTTCAGGGACATGATGATGAAGCCGGAACTGGTGAGATGGAAAGTGAAGCAGAAAGCATCTGGGATA
CTACTGGCTGAGCTGAAGAATAACACAAAGGTGAACATGGGTGCCGTCACTCCACAAATGAAGAGGTCACAGAAG
GACAGGTTCAGGATCATGAAATCAAAGTTGGTTCTAAATTTCCTGAAGGCTGGATCGAAGAAGGACAAGAAGACA
ATGAAGTTGCCGTAGGAACCCAGGCAGAAGATGACCGCCAGTAGAAAAGTACAGGTCACCAAGGTGGCTGTGTGG
ATGAGATCCTGAAGACCCTCCTGGAGAGAGGTGCTGTTTCCTTCTGGTGAGTGAGGCACATGGAGCGAGGTGGCA
TTGGGGGCATCTTGAAGGTGGCCTGTTGAGTTCATCTTCAGAGAGAAATGTCTCCTTCTTCTGCTCCCCAAAAAC
ACTCAGTGAGTCAGGACCTCAGCTCACAGACGAACAATATGAACAATATGTGACAAAAGAGGCCCAAGGCAGATG
AGCCTGCCAGGTGGCCGTAGCGCCTCCCCTCCTCCTCCATCTCGCAGTCCGGACCCCAGCTCCGCCTGCCGCTCC
GGATGATGCAGGACTACAGGCATCATCGCCATCGCCACCGCCTCCGCGCATCCCGGGAGCCGCGGCAAGACGCGG
GCGCAGAGGCGCAGTCACGGAGACGCCCAGGGCACCGCCCCCTCTGCCGGACACCGGGCCT

### EQUIVALENTS

[0756] Those skilled in the art will recognize, or be able to ascertain using no more than routine experimentation, many equivalents to the specific embodiments and methods described herein. Such equivalents are intended to be encompassed by the scope of the following claims.

The application's sequence listing, which the Patent Office published only in electronic form, follows.

SEQUENCE LISTING (2738 sequences)

SEQ ID NO: 1 - RNA, 2094 nt, Homo sapiens
  source 1..2094: mol_type = mRNA
gtcttgccgcggctcccgggatgcgcggaggcggtggcgatggcgatgatgcctctagtcctgcatcatccagagcggcaggcggagctggggtccggactgcgagatggaggaggggcggcgctgcggccacccggcaggcttatctgtcttgggcctcttttgtcacatattgctcatctgtgagctgaggccctgactcactgagtatttttggggagcagaagaaggagacatttctctccgaaaatgaactcaacaggccaccttcaggatgcccccaatgccacctcgctccatgtgcctcactcacaggaaggaaacagcacctctctccaggagggtcttcaggatctcatccacacagccaccttggtgacctgtacttttctactggcggtcatcttctgcctgggttcctatggcaacttcattgtcttcttgtccttcttcgatccagccttcaggaaattcagaaccaactttgatttcatgatcctgaacctgtccttctgtgacctcttcatttgtggagtgacagcccccatgttcacctttgtgttattcttcagctcagccagtagtatcccggatgctttctgcttcactttccatctcaccagttcaggcttcatcatcatgtctctgaagacagtggcagtgatcgccctgcaccggctccggatggtgttggggaaacagcctaatcgcacggcctcctttccctgcaccgtactcctcaccctgcttctctgggccaccagtttcacccttgccaccttggctaccttgaaaaccagcaagtcccacctctgtcttcccatgtccagtctgattgctggaaaagggaaagccattttgtctctctatgtggtcgacttcaccttctgtgttgctgtggtctctgtctcttacatcatgattgctcagaccctgcggaagaacgctcaagtcagaaagtgcccccctgtaatcacagtcgatgcttccagaccacagcctttcatgggggtccctgtgcagggaggtggagatcccatccagtgtgccatgccggctctgtataggaaccagaattacaacaaactgcagcacgttcagacccgtggatataccaagagtcccaaccaactggtcacccctgcagcaagccgactccagctcgtatcagccatcaacctctccactgccaaggattccaaagccgtggtcacctgtgtgatcattgtgctgtcagtcctggtgtgctgtcttccactggggatttccttggtacaggtggttctctccagcaatgggagcttcattctttaccagtttgaattgtttggatttactcttatatttttcaagtcaggattaaacccttttatatattctcggaacagtgcagggctgagaaggaaagtgctctggtgcctccaatacataggcctgggttttttctgctgcaaacaaaagactcgacttcgagccatgggaaaagggaacctcgaagtcaacagaaacaaatcctcccatcatgaaacaaactctgcctacatgttatctccaaagccacagaagaaatttgtggaccaggcttgtggcccaagtcattcaaaagaaagtatggtgagtcccaagatctctgctggacatcaacactgtggtcagagcagctcgacccccatcaacactcggattgaaccttactacagcatctataacagcagcccttcccaggaggagagcagcccatgtaacttacagccagtaaactcttttggatttgccaattcatatattgccatgcattatcacaccactaatgacttagtgcaggaatatgacagcacttcagccaagcagattccagtcccctccgtttaaagtcatggaggctataggatcttatgtaaacagtttttgtttctgatagtaatggactttattctaacttgagatcagtggcggatcaaaacctacaagattcaactgaaaagttggcagttatggttttctttcatctgatgtgtcagtatctgttgatttgctttgtagtttgttgacatcttaagatttgatgtgaaagttttagattttttaccctgc

SEQ ID NO: 2 - RNA, 2938 nt, Mus musculus
  source 1..2938: mol_type = mRNA
agagggaggggccgcgccccgggttcggtgactgcgccgcgcgcccggctcgcctaggctcccgggatgcgcggaggcggcagcgatggcgatgatgactctagcccggcagcttccaggccaccgggcacagatagggtcactactgcgacacggaggaggaagggcggcgctgaggccagctggcttatcttctttggcacatgctcgtcgtctgtgagctgagatcctgactcttttcctgctgaatttatttttttgagaacacaagaaagagacacctctctctgaagatgaacacaagtgccccgcttcagaatgtccccaatgccaccttgctaaacatgcctcccctgcacgggggaaatagcacttctctccaggaaggtcttcgagattttatccacacagccaccttggtgacctgcacttttctgcttgccatcatcttctgtctaggctcttatggaaattttattgtcttcttgtctttctttgacccatccttcaggaagttcagaaccaactttgatttcatgatcttgaacctgtctttctgtgatctgttcatctgtggggtcacagcccccatgttcaccttcgtgctgttcttcagctcagccagtagcatcccagatagcttctgcttcaccttccaccttaccagctcaggcttcgtcatcatgtccctcaagatggtggctgtgattgctctgcaccggctccggatggtgatggggaagcagcctaattgtacagcctccttttcctgcatcttgctccttacccttcttctctgggcgaccagctttacacttgccaccttggctacactgagaaccaataagtcccacctgtgtctccccatgtccagtcttatggatggggaagggaaagccattctgtctctgtatgttgttgactttaccttctgtgttgctgtggtgtctgtctcttatattatgattgctcaaacccttcggaaaaatgctcaagtaaaaaagtgccccccggtgatcacagttgatgcttccagaccacagccattcatgggggcctctgtgaagggaaatggagatcccatccagtgcaccatgccagctctgtataggaaccagaattataacaaactgcagcacagtcaaactcatggatacactaagaatatcaaccagatgccaatcccctcagccagtcgactccagctggtatcagccatcaacttctctactgccaaggattccaaagccgtggtcacctgtgtggtcatcgtgttgtcagtcctggtgtgctgtcttcctcttgggatttccctggtgcaaatggttctgtctgacaatggcagttttatcctttaccagtttgaactgtttggatttactctgatatttttcaagtcaggattaaatccttttatatattctcggaacagtgctgggctgagaaggaaagtactctggtgcctgagatacactggcctgggctttctctgctgcaaacagaaaactcgacttcgggccatgggaaaagggaaccttgaaatcaatagaaacaaatcttctcatcatgagacaaactctgcctacatgctgtctccaaaaccacagagaaaatttgtggaccaggcttgtggcccaagtcactcaaaggaaagtgcagcgagtcccaaagtttctgctggacatcaaccctgtggtcaaagcagttccacacccatcaacactaggattgaaccttactatagcatctataacagcagcccttcccagcaggagagcggtccggcaaacttgcctccagtgaactcttttgggtttgccagttcctacatcgccatgcactattacaccaccaatgatttgatgcaggaatatgacagcacgtcagcaaaacaaattcctatcccctctgtttaacatggccagcgagtctggagggaatggttttctattctaactaagcaagcctttaaaagagtttgcaaagcaaaacctggactcaactgaacacttgacaatttgattttcttttgtttataatattagtatctgggttggcttcatggtttcttgacattttaagatttgatgtaaaagtttatttcaacttctactctaatctatgtcccaatactttatattaaactgctaagaagatgctaggatctatcctactgatgaccttttaagtcagtattatgggactttagatatgtattggctacattttctttctttccatttatttatttactcactttatatcctgattgaagccccacctctcctcccagtacccgctcacatggcccttctcccaattcctactaccctttatttctgaaaagggggaggttcctcctgggtaaccaacccaccctggcacctcaagtcactgcaggactaggtatatcctctgccactaaggccagacatggcagcccaattacgggagcaggattcacagacaggaaatagagtcagggacaaccactgctctatttgttgggagacccacatgaagaccaagctgttacaaatgtgctggtgagcctaggtccagctcatatgtgctctttagttggtggttcagtctctgggagccttcaagggtcaggttagttgcctctgttggtattctgaaggggtacctattccctccaggttcctcaatccttcccccaactcattcacaagacttcccaggctcagtctaatgtttcgctgtggtactctgcatctgtttctgtcaactgctataatttggctacattttttaaaatgtgtttgaaaaaaaaatgatctttctgaagtgttatttttataaaaatatggaatttgtgtttttgaagtactgaaacagcaaacagtgtactttttttggtggcaagtgatttaaataaaaaacttactattaaagcaaaaaaaaaaaaaaaaaa

SEQ ID NO: 3 - RNA, 2610 nt, Rattus norvegicus
  source 1..2610: mol_type = mRNA
atgaattcaagtgccccgcttcagaatgttcccaatgccaccttgctatacacacctcccctgcagggaggaaataacacttctctccaggagggtcttcgagattttatccacacagccaccttggtgacctgcacggtcctgcttgccatcatcttctgtctaggctcttatggaaattttattgtcttcttgtctttctttgacccggccttcagaaagttcagaactaactttgatttcatgatcttgaacctgtctttctgtgatctgttcatctgtggggccacagcccccatgttcacctttgtgctgttcttcagctcagccaggagcatcccagacagtttctgcttcaccttccaccttaccagctcaggtttcatcatcatgtccctcaagatggtagctgtgattgccctgcaccggctccggatggtgatggggaagcagcctaattgcaccgcttccttttcctgcatcttgctccttacccttcttctctgggccaccagctttacacttgccaccttggctacactgagaaccagtaagtcccacctgtgtctccccatgtccagtcttatggacggggaagggaaggccattctgtctctgtatgttgttgactttaccttctgtgtggccgtggtgtctgtctcttatatcatgattgctcaaacccttcggaagaatgcccaagtaaaaaagtgcccccctgtgatcacagttgatgcttccagaccacagccattcatgggggcctctgtgaagggaaatggagatcccatccagtgcaccatgccagctctgtataggaaccagaattataacaaactgcagcacaatcaaactcatggatacactaagaatgccaaccagatgccaatcccctcagccagtcggctccagctggtatcagcggtcaacctctctactgccaaggattccaaagctgtggtcacctgcatggtcatcgtgttgtcggttctagtgtgctgtcttcctctggggatttccctgctgcaagtggttctgtctgacagtggcagcttcatcctttaccagtttgagttatttggatttactctgatatttttcaagtcaggattaaatccttttatatattctcggaacagtgctgggctgagaaggaaagtgctctggtgcctgcgatacactggcctgggcttcctctgctgcaaacagaaaactcgacttcgggccatggggaaagggaaccttgaaatcaatagaaacaaatcctcccatcatgagacaaactctgcctacatgctgtctccaaaaccacagaagaaatttgtagaccaggcttgtggcccaagtcattcaaaagaaagtgtagcaagtcccaaagtctctgctggacatcacccctgtgggcagagcagctcgacacccatcaacactcggattgaaccttactatagcatctataacagcagcccgtcccagcaggagagcagcccagcaaacctgcagccagtgaactcttttggtttcgccagttcctacatcgccatgcactattacaccaccaatgacttgatgcaggactatgacagcacgtcggcaaaacagatccctatcccttctgtttaatacagccagagaatctggagggaatggttttctctctggactgaacaaacctttaaaagagcttgagttccatggcaaaacaaaacctggaatcaactgaagacttgactttctttcacctgaagtattagtatccgggttggcttcatggtttcttgacattttaagatttagtgtaaaagtttagttcaatttatactctgacccatgtcccaatactttatactaaactgctaaaaagatgtcagggactattctattaatgacacccttttaagtcagtattatgggattttagatatgtattgactacattttctttctttccactaatttatttatttattcactttacatcccgattgaagccccacctctcctcccagtactccctctcatggtccctctcccaatttctcctcccctttatttctgaggaggaggaggtccctcctggggaaacaaccttcctcaagtcactgaaggactaggtacatcctctgccactgaggccagacgtgctagcccaattaggagcaggattcacagacaggaaacagtcagggacagtcagcactctactcattgggggacccatataaagaccaagctgcacctctgttacaaatgtgctggtgggcctaggaccagcctctttggctagtggttcagtacctgggagccttcaaggatccaggttagttggtattctgaaggagtacctgttccctccaggttcctctatcctttctccaacccttccacaagacttcccaagctccagtctaatgtttggctgtgggactgcatttgtttctgtcaactgctgtaatttggctacatttttaaaatggtgtttgaaaaaaattatctttctgaagtgttatttttataaaaatatggaattagtgtctttgaagtactgaaacagcaaacagtgtacttttttggtggcaagtggtttaaataaaaaacttactgttaaaa

SEQ ID NO: 4 - RNA, 2161 nt, Macaca mulatta
  source 1..2161: mol_type = mRNA
aggcccggtgtccggcagagggggcggtgccctgggcgtctccgtgactgcgcctctgcgcccgcgtcttgccgcggctcccgggatgcgcggaggcggtggcgatggcgatgatgcctgtagtcctgcatcatccggagcggcaggcggagctggggtccggactgcgagatggaggaggaggggaggcgctacggccacctggcaggctcatctgccttgggcctcttttgtcacatattgttcatattgttcgtctgtgagctgaggtcctgactcactgagtgtttttggggagcagaagaaggagacatttctctctgaagatgaactcaacaggccaccttcaagatgcccccaatgccacctcgctccatgtgcctcactcaccagaaggaaacagcacctctctccaggagggtcttcaggatctcatccacacagccaccttggtgacctgtacttttctactggcggtcatcttctgcctgggttcctacggcaacttcattgtcttcttgtccttcttcgatccagccttcaggaaatttagaaccaactttgatttcatgatcctgaacctgtccttctgtgacctcttcatttgtggagtgacggcacccatgttcacctttgtgttattcttcagctcagccagtagtatcccagatgctttctgcttcactttccatctcaccagttccggcttcatcatcatgtccctgaagacagtggcagtgattgccctgcaccggctccgcatggtgttggggaagcaacctaatcgcatggcctcgtttccctgcaccgtcctcctcaccctgcttctctgggccaccagcttcacccttgccaccttggctaccttgaaaaccagcaagtcccacctctgtcttcccatgtccagtctgattgctggaaaagggaaagccattttgtctctctatgtggtcgacttcaccttctgtgttgctgtggtctctgtctcttacatcatgattgctcagaccctgcggaagaacgctcaagtcagaaagtgtccccctgtaatcacagtcgatgcttccagaccacagcctttcatgggggtccctgtgcagggaggtggagatcccatccagtgtgccatgccggctctgtataggaaccagaattacaacaaactgcagcacgttcagacccgtggatataccaagagtcccaaccagctggccacccctgcagcgagccgactccagctggtatcagccatcaacctctccactgccaaggattccaaagccgtggtcacctgcgtgatcattgtgctgtcagtcctggtgtgctgtcttccactggggatctccttggtacaggtggttctctccagcaatgggagcttcattctttaccagtttgaattgtttggatttacccttatatttttcaagtcaggattaaacccttttatatattctcggaacagtgcagggctgagaaggaaagtgctctggtgcctccagtacataggcctgggttttttctgctgcaaacaaaagactcgacttcgagccatgggaaaagggaacctcgaagtcaacagaaacaaatcctcccatcatgaaacaaactctgcctacatgttatctccaaagccacagaagaaatttgtggaccaggcttgtggcccaagtcattcaaaggaaagtgtggtgagtcccaagatctctgctggacatcaacactgtggtcagagcagctcaacccccatcaacactcgaattgaaccttactacagcatctataacagcagcccttcccaggaggagagcagcccatgtaacttacagccagtaaactcttttggatttgccaattcatatattgccatgcattatcacaccactaatgacttaatgcaggaatatgacagcacttcagccaagcagattccagttccctctgtttaaagtcactgaggctataggatcttatttttgtttctgatactaatggactttcttctaactttgagttcagtgacggatcaaaacctaaaagattcaactgaaaagttggcagttatggttttctttcgtctgatgtgtcagtatgtgttgatttgctttgtagtttgttgacatcttaagatttgatgtgaaagttttagatttttaccttg

SEQ ID NO: 5 - RNA, 2094 nt, synthetic construct
  source 1..2094: mol_type = other RNA
gcagggtaaaaaatctaaaactttcacatcaaatcttaagatgtcaacaaactacaaagcaaatcaacagatactgacacatcagatgaaagaaaaccataactgccaacttttcagttgaatcttgtaggttttgatccgccactgatctcaagttagaataaagtccattactatcagaaacaaaaactgtttacataagatcctatagcctccatgactttaaacggaggggactggaatctgcttggctgaagtgctgtcatattcctgcactaagtcattagtggtgtgataatgcatggcaatatatgaattggcaaatccaaaagagtttactggctgtaagttacatgggctgctctcctcctgggaagggctgctgttatagatgctgtagtaaggttcaatccgagtgttgatgggggtcgagctgctctgaccacagtgttgatgtccagcagagatcttgggactcaccatactttcttttgaatgacttgggccacaagcctggtccacaaatttcttctgtggctttggagataacatgtaggcagagtttgtttcatgatgggaggatttgtttctgttgacttcgaggttcccttttcccatggctcgaagtcgagtcttttgtttgcagcagaaaaaacccaggcctatgtattggaggcaccagagcactttccttctcagccctgcactgttccgagaatatataaaagggtttaatcctgacttgaaaaatataagagtaaatccaaacaattcaaactggtaaagaatgaagctcccattgctggagagaaccacctgtaccaaggaaatccccagtggaagacagcacaccaggactgacagcacaatgatcacacaggtgaccacggctttggaatccttggcagtggagaggttgatggctgatacgagctggagtcggcttgctgcaggggtgaccagttggttgggactcttggtatatccacgggtctgaacgtgctgcagtttgttgtaattctggttcctatacagagccggcatggcacactggatgggatctccacctccctgcacagggacccccatgaaaggctgtggtctggaagcatcgactgtgattacaggggggcactttctgacttgagcgttcttccgcagggtctgagcaatcatgatgtaagagacagagaccacagcaacacagaaggtgaagtcgaccacatagagagacaaaatggctttcccttttccagcaatcagactggacatgggaagacagaggtgggacttgctggttttcaaggtagccaaggtggcaagggtgaaactggtggcccagagaagcagggtgaggagtacggtgcagggaaaggaggccgtgcgattaggctgtttccccaacaccatccggagccggtgcagggcgatcactgccactgtcttcagagacatgatgatgaagcctgaactggtgagatggaaagtgaagcagaaagcatccgggatactactggctgagctgaagaataacacaaaggtgaacatgggggctgtcactccacaaatgaagaggtcacagaaggacaggttcaggatcatgaaatcaaagttggttctgaatttcctgaaggctggatcgaagaaggacaagaagacaatgaagttgccataggaacccaggcagaagatgaccgccagtagaaaagtacaggtcaccaaggtggctgtgtggatgagatcctgaagaccctcctggagagaggtgctgtttccttcctgtgagtgaggcacatggagcgaggtggcattgggggcatcctgaaggtggcctgttgagttcattttcggagagaaatgtctccttcttctgctccccaaaaatactcagtgagtcagggcctcagctcacagatgagcaatatgtgacaaaagaggcccaagacagataagcctgccgggtggccgcagcgccgcccctcctccatctcgcagtccggaccccagctccgcctgccgctctggatgatgcaggactagaggcatcatcgccatcgccaccgcctccgcgcatcccgggagccgcggcaagac

SEQ ID NO: 6 - RNA, 2938 nt, synthetic construct
  source 1..2938: mol_type = other RNA
ttttttttttttttttttgctttaatagtaagttttttatttaaatcacttgccaccaaaaaaagtacactgtttgctgtttcagtacttcaaaaacacaaattccatatttttataaaaataacacttcagaaagatcatttttttttcaaacacattttaaaaaatgtagccaaattatagcagttgacagaaacagatgcagagtaccacagcgaaacattagactgagcctgggaagtcttgtgaatgagttgggggaaggattgaggaacctggagggaataggtaccccttcagaataccaacagaggcaactaacctgacccttgaaggctcccagagactgaaccaccaactaaagagcacatatgagctggacctaggctcaccagcacatttgtaacagcttggtcttcatgtgggtctcccaacaaatagagcagtggttgtccctgactctatttcctgtctgtgaatcctgctcccgtaattgggctgccatgtctggccttagtggcagaggatatacctagtcctgcagtgacttgaggtgccagggtgggttggttacccaggaggaacctcccccttttcagaaataaagggtagtaggaattgggagaagggccatgtgagcgggtactgggaggagaggtggggcttcaatcaggatataaagtgagtaaataaataaatggaaagaaagaaaatgtagccaatacatatctaaagtcccataatactgacttaaaaggtcatcagtaggatagatcctagcatcttcttagcagtttaatataaagtattgggacatagattagagtagaagttgaaataaacttttacatcaaatcttaaaatgtcaagaaaccatgaagccaacccagatactaatattataaacaaaagaaaatcaaattgtcaagtgttcagttgagtccaggttttgctttgcaaactcttttaaaggcttgcttagttagaatagaaaaccattccctccagactcgctggccatgttaaacagaggggataggaatttgttttgctgacgtgctgtcatattcctgcatcaaatcattggtggtgtaatagtgcatggcgatgtaggaactggcaaacccaaaagagttcactggaggcaagtttgccggaccgctctcctgctgggaagggctgctgttatagatgctatagtaaggttcaatcctagtgttgatgggtgtggaactgctttgaccacagggttgatgtccagcagaaactttgggactcgctgcactttcctttgagtgacttgggccacaagcctggtccacaaattttctctgtggttttggagacagcatgtaggcagagtttgtctcatgatgagaagatttgtttctattgatttcaaggttcccttttcccatggcccgaagtcgagttttctgtttgcagcagagaaagcccaggccagtgtatctcaggcaccagagtactttccttctcagcccagcactgttccgagaatatataaaaggatttaatcctgacttgaaaaatatcagagtaaatccaaacagttcaaactggtaaaggataaaactgccattgtcagacagaaccatttgcaccagggaaatcccaagaggaagacagcacaccaggactgacaacacgatgaccacacaggtgaccacggctttggaatccttggcagtagagaagttgatggctgataccagctggagtcgactggctgaggggattggcatctggttgatattcttagtgtatccatgagtttgactgtgctgcagtttgttataattctggttcctatacagagctggcatggtgcactggatgggatctccatttcccttcacagaggcccccatgaatggctgtggtctggaagcatcaactgtgatcaccggggggcacttttttacttgagcatttttccgaagggtttgagcaatcataatataagagacagacaccacagcaacacagaaggtaaagtcaacaacatacagagacagaatggctttcccttccccatccataagactggacatggggagacacaggtgggacttattggttctcagtgtagccaaggtggcaagtgtaaagctggtcgcccagagaagaagggtaaggagcaagatgcaggaaaaggaggctgtacaattaggctgcttccccatcaccatccggagccggtgcagagcaatcacagccaccatcttgagggacatgatgacgaagcctgagctggtaaggtggaaggtgaagcagaagctatctgggatgctactggctgagctgaagaacagcacgaaggtgaacatgggggctgtgaccccacagatgaacagatcacagaaagacaggttcaagatcatgaaatcaaagttggttctgaacttcctgaaggatgggtcaaagaaagacaagaagacaataaaatttccataagagcctagacagaagatgatggcaagcagaaaagtgcaggtcaccaaggtggctgtgtggataaaatctcgaagaccttcctggagagaagtgctatttcccccgtgcaggggaggcatgtttagcaaggtggcattggggacattctgaagcggggcacttgtgttcatcttcagagagaggtgtctctttcttgtgttctcaaaaaaataaattcagcaggaaaagagtcaggatctcagctcacagacgacgagcatgtgccaaagaagataagccagctggcctcagcgccgcccttcctcctccgtgtcgcagtagtgaccctatctgtgcccggtggcctggaagctgccgggctagagtcatcatcgccatcgctgccgcctccgcgcatcccgggagcctaggcgagccgggcgcgcggcgcagtcaccgaacccggggcgcggcccctccctct

SEQ ID NO: 7 - RNA, 2610 nt, synthetic construct
  source 1..2610: mol_type = other RNA
ttttaacagtaagttttttatttaaaccacttgccaccaaaaaagtacactgtttgctgtttcagtacttcaaagacactaattccatatttttataaaaataacacttcagaaagataatttttttcaaacaccattttaaaaatgtagccaaattacagcagttgacagaaacaaatgcagtcccacagccaaacattagactggagcttgggaagtcttgtggaagggttggagaaaggatagaggaacctggagggaacaggtactccttcagaataccaactaacctggatccttgaaggctcccaggtactgaaccactagccaaagaggctggtcctaggcccaccagcacatttgtaacagaggtgcagcttggtctttatatgggtcccccaatgagtagagtgctgactgtccctgactgtttcctgtctgtgaatcctgctcctaattgggctagcacgtctggcctcagtggcagaggatgtacctagtccttcagtgacttgaggaaggttgtttccccaggagggacctcctcctcctcagaaataaaggggaggagaaattgggagagggaccatgagagggagtactgggaggagaggtggggcttcaatcgggatgtaaagtgaataaataaataaattagtggaaagaaagaaaatgtagtcaatacatatctaaaatcccataatactgacttaaaagggtgtcattaatagaatagtccctgacatctttttagcagtttagtataaagtattgggacatgggtcagagtataaattgaactaaacttttacactaaatcttaaaatgtcaagaaaccatgaagccaacccggatactaatacttcaggtgaaagaaagtcaagtcttcagttgattccaggttttgttttgccatggaactcaagctcttttaaaggtttgttcagtccagagagaaaaccattccctccagattctctggctgtattaaacagaagggatagggatctgttttgccgacgtgctgtcatagtcctgcatcaagtcattggtggtgtaatagtgcatggcgatgtaggaactggcgaaaccaaaagagttcactggctgcaggtttgctgggctgctctcctgctgggacgggctgctgttatagatgctatagtaaggttcaatccgagtgttgatgggtgtcgagctgctctgcccacaggggtgatgtccagcagagactttgggacttgctacactttcttttgaatgacttgggccacaagcctggtctacaaatttcttctgtggttttggagacagcatgtaggcagagtttgtctcatgatgggaggatttgtttctattgatttcaaggttccctttccccatggcccgaagtcgagttttctgtttgcagcagaggaagcccaggccagtgtatcgcaggcaccagagcactttccttctcagcccagcactgttccgagaatatataaaaggatttaatcctgacttgaaaaatatcagagtaaatccaaataactcaaactggtaaaggatgaagctgccactgtcagacagaaccacttgcagcagggaaatccccagaggaagacagcacactagaaccgacaacacgatgaccatgcaggtgaccacagctttggaatccttggcagtagagaggttgaccgctgataccagctggagccgactggctgaggggattggcatctggttggcattcttagtgtatccatgagtttgattgtgctgcagtttgttataattctggttcctatacagagctggcatggtgcactggatgggatctccatttcccttcacagaggcccccatgaatggctgtggtctggaagcatcaactgtgatcacaggggggcacttttttacttgggcattcttccgaagggtttgagcaatcatgatataagagacagacaccacggccacacagaaggtaaagtcaacaacatacagagacagaatggccttcccttccccgtccataagactggacatggggagacacaggtgggacttactggttctcagtgtagccaaggtggcaagtgtaaagctggtggcccagagaagaagggtaaggagcaagatgcaggaaaaggaagcggtgcaattaggctgcttccccatcaccatccggagccggtgcagggcaatcacagctaccatcttgagggacatgatgatgaaacctgagctggtaaggtggaaggtgaagcagaaactgtctgggatgctcctggctgagctgaagaacagcacaaaggtgaacatgggggctgtggccccacagatgaacagatcacagaaagacaggttcaagatcatgaaatcaaagttagttctgaactttctgaaggccgggtcaaagaaagacaagaagacaataaaatttccataagagcctagacagaagatgatggcaagcaggaccgtgcaggtcaccaaggtggctgtgtggataaaatctcgaagaccctcctggagagaagtgttatttcctccctgcaggggaggtgtgtatagcaaggtggcattgggaacattctgaagcggggcacttgaattcat

SEQ ID NO: 8 - RNA, 2161 nt, synthetic construct
  source 1..2161: mol_type = other RNA
caaggtaaaaatctaaaactttcacatcaaatcttaagatgtcaacaaactacaaagcaaatcaacacatactgacacatcagacgaaagaaaaccataactgccaacttttcagttgaatcttttaggttttgatccgtcactgaactcaaagttagaagaaagtccattagtatcagaaacaaaaataagatcctatagcctcagtgactttaaacagagggaactggaatctgcttggctgaagtgctgtcatattcctgcattaagtcattagtggtgtgataatgcatggcaatatatgaattggcaaatccaaaagagtttactggctgtaagttacatgggctgctctcctcctgggaagggctgctgttatagatgctgtagtaaggttcaattcgagtgttgatgggggttgagctgctctgaccacagtgttgatgtccagcagagatcttgggactcaccacactttcctttgaatgacttgggccacaagcctggtccacaaatttcttctgtggctttggagataacatgtaggcagagtttgtttcatgatgggaggatttgtttctgttgacttcgaggttcccttttcccatggctcgaagtcgagtcttttgtttgcagcagaaaaaacccaggcctatgtactggaggcaccagagcactttccttctcagccctgcactgttccgagaatatataaaagggtttaatcctgacttgaaaaatataagggtaaatccaaacaattcaaactggtaaagaatgaagctcccattgctggagagaaccacctgtaccaaggagatccccagtggaagacagcacaccaggactgacagcacaatgatcacgcaggtgaccacggctttggaatccttggcagtggagaggttgatggctgataccagctggagtcggctcgctgcaggggtggccagctggttgggactcttggtatatccacgggtctgaacgtgctgcagtttgttgtaattctggttcctatacagagccggcatggcacactggatgggatctccacctccctgcacagggacccccatgaaaggctgtggtctggaagcatcgactgtgattacagggggacactttctgacttgagcgttcttccgcagggtctgagcaatcatgatgtaagagacagagaccacagcaacacagaaggtgaagtcgaccacatagagagacaaaatggctttcccttttccagcaatcagactggacatgggaagacagaggtgggacttgctggttttcaaggtagccaaggtggcaagggtgaagctggtggcccagagaagcagggtgaggaggacggtgcagggaaacgaggccatgcgattaggttgcttccccaacaccatgcggagccggtgcagggcaatcactgccactgtcttcagggacatgatgatgaagccggaactggtgagatggaaagtgaagcagaaagcatctgggatactactggctgagctgaagaataacacaaaggtgaacatgggtgccgtcactccacaaatgaagaggtcacagaaggacaggttcaggatcatgaaatcaaagttggttctaaatttcctgaaggctggatcgaagaaggacaagaagacaatgaagttgccgtaggaacccaggcagaagatgaccgccagtagaaaagtacaggtcaccaaggtggctgtgtggatgagatcctgaagaccctcctggagagaggtgctgtttccttctggtgagtgaggcacatggagcgaggtggcattgggggcatcttgaaggtggcctgttgagttcatcttcagagagaaatgtctccttcttctgctccccaaaaacactcagtgagtcaggacctcagctcacagacgaacaatatgaacaatatgtgacaaaagaggcccaaggcagatgagcctgccaggtggccgtagcgcctcccctcctcctccatctcgcagtccggaccccagctccgcctgccgctccggatgatgcaggactacaggcatcatcgccatcgccaccgcctccgcgcatcccgggagccgcggcaagacgcgggcgcagaggcgcagtcacggagacgcccagggcaccgccccctctgccggacaccgggcct

SEQ ID NO: 9 - protein, 16 aa, unidentified
AAVALLPAVLLALLAP

SEQ ID NO: 10 - protein, 11 aa, unidentified
AALLPVLLAAP

SEQ ID NO: 11 - protein, 13 aa, synthetic construct
GRKKRRQRRRPPQ

SEQ ID NO: 12 - protein, 16 aa, Drosophila Antennapedia
RQIKIWFQNRRMKWKK

SEQ ID NO: 13 - DNA, 21 bp, synthetic construct
  source 1..21: mol_type = other DNA
  modified_base 1: mod_base = OTHER; note = 2'-O-methylcytidine-3'-phosphate
  modified_base 2: mod_base = OTHER; note = 2'-O-methyluridine-3'-phosphate
  modified_base 3: mod_base = OTHER; note = 2'-O-methyluridine-3'-phosphate
  modified_base 4: mod_base = OTHER; note = adenosine-3'-phosphate
  modified_base 5: mod_base = OTHER; note = 2'-O-methylcytidine-3'-phosphate
  modified_base 6: mod_base = OTHER; note = guanosine-3'-phosphate
  modified_base 7: mod_base = OTHER; note = 2'-O-methylcytidine-3'-phosphate
  modified_base 8: mod_base = OTHER; note = 2'-O-methyluridine-3'-phosphate
  modified_base 9: mod_base = OTHER; note = guanosine-3'-phosphate
  modified_base 10: mod_base = OTHER; note = adenosine-3'-phosphate
  modified_base 11: mod_base = OTHER; note = guanosine-3'-phosphate
  modified_base 12: mod_base = OTHER; note = 2'-O-methyluridine-3'-phosphate
  modified_base 13: mod_base = OTHER; note = adenosine-3'-phosphate
  modified_base 14: mod_base = OTHER; note = 2'-O-methylcytidine-3'-phosphate
  modified_base 15: mod_base = OTHER; note = 2'-O-methyluridine-3'-phosphate
  modified_base 16: mod_base = OTHER; note = 2'-O-methyluridine-3'-phosphate
  modified_base 17: mod_base = OTHER; note = 2'-O-methylcytidine-3'-phosphate
  modified_base 18: mod_base = OTHER; note = guanosine-3'-phosphate
  modified_base 19: mod_base = OTHER; note = adenosine-3'-phosphate
  modified_base 20: mod_base = OTHER; note = 2'-deoxythymidine-3'-phosphorothioate
  modified_base 21: mod_base = OTHER; note = 2'-deoxythymidine-3'-phosphate
  misc_feature 1..19: note = RNA
  misc_feature 20..21: note = DNA
cttacgctgagtacttcgatt

SEQ ID NO: 14 - DNA, 21 bp, synthetic construct
  source 1..21: mol_type = other DNA
  modified_base 1: mod_base = OTHER; note = uridine-3'-phosphate
  modified_base 2: mod_base = OTHER; note = cytidine-3'-phosphate
  modified_base 3: mod_base = OTHER; note = guanosine-3'-phosphate
  modified_base 4: mod_base = OTHER; note = adenosine-3'-phosphate
  modified_base 5: mod_base = OTHER; note = adenosine-3'-phosphate
  modified_base 6: mod_base = OTHER; note = guanosine-3'-phosphate
  modified_base 7: mod_base = OTHER; note = 2'-O-methyluridine-3'-phosphate
  modified_base 8: mod_base = OTHER; note = adenosine-3'-phosphate
  modified_base 9: mod_base = OTHER; note = cytidine-3'-phosphate
  modified_base 10: mod_base = OTHER; note = uridine-3'-phosphate
  modified_base 11: mod_base = OTHER; note = 2'-O-methylcytidine-3'-phosphate
  modified_base 12: mod_base = OTHER; note = adenosine-3'-phosphate
  modified_base 13: mod_base = OTHER; note = guanosine-3'-phosphate
  modified_base 14: mod_base = OTHER; note = cytidine-3'-phosphate
  modified_base 15: mod_base = OTHER; note = guanosine-3'-phosphate
  modified_base 16: mod_base = OTHER; note = 2'-O-methyluridine-3'-phosphate
  modified_base 17: mod_base = OTHER; note = adenosine-3'-phosphate
  modified_base 18: mod_base = OTHER; note = adenosine-3'-phosphate
  modified_base 19: mod_base = OTHER; note = guanosine-3'-phosphate
  modified_base 20: mod_base = OTHER; note = 2'-deoxythymidine-3'-phosphorothioate
  modified_base 21: mod_base = OTHER; note = 2'-deoxythymidine-3'-phosphate
  misc_feature 1..19: note = RNA
  misc_feature 20..21: note = DNA
tcgaagtactcagcgtaagtt

SEQ ID NO: 15 - RNA, 21 nt, synthetic construct
  source 1..21: mol_type = other RNA
atggcgatgatgcctctagtt

SEQ ID NO: 16 - RNA, 21 nt, synthetic construct
  source 1..21: mol_type = other RNA
tgatgcctctagtcctgcatt

SEQ ID NO: 17 - RNA, 21 nt, synthetic construct
  source 1..21: mol_type = other RNA
cctctagtcctgcatcatcct

SEQ ID NO: 18 - RNA, 21 nt, synthetic construct
  source 1..21: mol_type = other RNA
gtcctgcatcatccagagcgt

SEQ ID NO: 19 - RNA, 21 nt, synthetic construct
  source 1..21: mol_type = other RNA
ccggactgcgagatggaggat

SEQ ID NO: 20 - RNA, 21 nt, synthetic construct
  source 1..21: mol_type = other RNA
cacccggcaggcttatctgtt

SEQ ID NO: 21 - RNA, 21 nt, synthetic construct
  source 1..21: mol_type = other RNA
ggcaggcttatctgtcttggt

SEQ ID NO: 22 - RNA, 21 nt, synthetic construct
  source 1..21: mol_type = other RNA
atctgtcttgggcctcttttt

SEQ ID NO: 23 - RNA, 21 nt, synthetic construct
  source 1..21: mol_type = other RNA
tcttgggcctcttttgtcact

SEQ ID NO: 24 - RNA, 21 nt, synthetic construct
  source 1..21: mol_type = other RNA
ggcctcttttgtcacatattt

SEQ ID NO: 25 - RNA, 21 nt, synthetic construct
  source 1..21: mol_type = other RNA
ttttgtcacatattgctcatt

SEQ ID NO: 26 - RNA, 21 nt, synthetic construct
  source 1..21: mol_type = other RNA
cacatattgctcatctgtgat

SEQ ID NO: 27 - RNA, 21 nt, synthetic construct
  source 1..21: mol_type = other RNA
attgctcatctgtgagctgat

SEQ ID NO: 28 - RNA, 21 nt, synthetic construct
  source 1..21: mol_type = other RNA
catctgtgagctgaggccctt

SEQ ID NO: 29 - RNA, 21 nt, synthetic construct
  source 1..21: mol_type = other RNA
ggccctgactcactgagtatt

SEQ ID NO: 30 - RNA, 21 nt, synthetic construct
  source 1..21: mol_type = other RNA
tgactcactgagtatttttgt

SEQ ID NO: 31 - RNA, 21 nt, synthetic construct
  source 1..21: mol_type = other RNA
gagcagaagaaggagacattt

SEQ ID NO: 32 - RNA, 21 nt, synthetic construct
  source 1..21: mol_type = other RNA
gaagaaggagacatttctctt

SEQ ID NO: 33 - RNA, 21 nt, synthetic construct
  source 1..21: mol_type = other RNA
ggagacatttctctccgaaat

SEQ ID NO: 34 - RNA, 21 nt, synthetic construct
  source 1..21: mol_type = other RNA
tttctctccgaaaatgaactt

SEQ ID NO: 35 - RNA, 21 nt, synthetic construct
  source 1..21: mol_type = other RNA
ctccgaaaatgaactcaacat

SEQ ID NO: 36 - RNA, 21 nt, synthetic construct
  source 1..21: mol_type = other RNA
aaaatgaactcaacaggccat

SEQ ID NO: 37 - RNA, 21 nt, synthetic construct
  source 1..21: mol_type = other RNA
gaactcaacaggccaccttct

SEQ ID NO: 38 - RNA, 21 nt, synthetic construct
  source 1..21: mol_type = other RNA
acaggccaccttcaggatgct

SEQ ID NO: 39 - RNA, 21 nt, synthetic construct
  source 1..21: mol_type = other RNA
ccacctcgctccatgtgcctt

SEQ ID NO: 40 - RNA, 21 nt, synthetic construct
  source 1..21: mol_type = other RNA
tcgctccatgtgcctcactct

SEQ ID NO: 41 - RNA, 21 nt, synthetic construct
  source 1..21: mol_type = other RNA
atgtgcctcactcacaggaat

SEQ ID NO: 42 - RNA, 21 nt, synthetic construct
  source 1..21: mol_type = other RNA
cctcactcacaggaaggaaat

SEQ ID NO: 43 - RNA, 21 nt, synthetic construct
  source 1..21: mol_type = other RNA
acaggaaggaaacagcacctt

SEQ ID NO: 44 - RNA, 21 nt, synthetic construct
  source 1..21: mol_type = other RNA
aaggaaacagcacctctctct

SEQ ID NO: 45 - RNA, 21 nt, synthetic construct
  source 1..21: mol_type = other RNA
ctctccaggagggtcttcagt

SEQ ID NO: 46 - RNA, 21 nt, synthetic construct
  source 1..21: mol_type = other RNA
caggagggtcttcaggatctt

SEQ ID NO: 47 - RNA, 21 nt, synthetic construct
  source 1..21: mol_type = other RNA
ggtcttcaggatctcatccat

SEQ ID NO: 48 - RNA, 21 nt, synthetic construct
  source 1..21: mol_type = other RNA
tcaggatctcatccacacagt

SEQ ID NO: 49 - RNA, 21 nt, synthetic construct
  source 1..21: mol_type = other RNA
tcatccacacagccaccttgt

SEQ ID NO: 50 - RNA, 21 nt, synthetic construct
  source 1..21: mol_type = other RNA
cacacagccaccttggtgact

SEQ ID NO: 51 - RNA, 21 nt, synthetic construct
  source 1..21: mol_type = other RNA
agccaccttggtgacctgtat

SEQ ID NO: 52 - RNA, 21 nt, synthetic construct
  source 1..21: mol_type = other RNA
ccttggtgacctgtacttttt

SEQ ID NO: 53 - RNA, 21 nt, synthetic construct
  source 1..21: mol_type = other RNA
gtgacctgtacttttctactt

SEQ ID NO: 54 - RNA, 21 nt, synthetic construct
  source 1..21: mol_type = other RNA
acttttctactggcggtcatt

SEQ ID NO: 55 - RNA, 21 nt, synthetic construct
  source 1..21: mol_type = other RNA
tctactggcggtcatcttctt

SEQ ID NO: 56 - RNA, 21 nt, synthetic construct
  source 1..21: mol_type = other RNA
ggtcatcttctgcctgggttt

SEQ ID NO: 57 - RNA, 21 nt, synthetic construct
  source 1..21: mol_type = other RNA
ttctgcctgggttcctatggt

SEQ ID NO: 58 - RNA, 21 nt, synthetic construct
  source 1..21: mol_type = other RNA
cctgggttcctatggcaactt

SEQ ID NO: 59 - RNA, 21 nt, synthetic construct
  source 1..21: mol_type = other RNA
gttcctatggcaacttcattt

SEQ ID NO: 60 - RNA, 21 nt, synthetic construct
  source 1..21: mol_type = other RNA
tatggcaacttcattgtcttt

SEQ ID NO: 61 - RNA, 21 nt, synthetic construct
  source 1..21: mol_type = other RNA
caacttcattgtcttcttgtt

SEQ ID NO: 62 - RNA, 21 nt, synthetic construct
  source 1..21: mol_type = other RNA
tcattgtcttcttgtccttct

SEQ ID NO: 63 - RNA, 21 nt, synthetic construct
  source 1..21: mol_type = other RNA
gtcttcttgtccttcttcgat

SEQ ID NO: 64 - RNA, 21 nt, synthetic construct
  source 1..21: mol_type = other RNA
cttgtccttcttcgatccagt

SEQ ID NO: 65 - RNA, 21 nt, synthetic construct
  source 1..21: mol_type = other RNA
ccttcttcgatccagccttct

SEQ ID NO: 66 - RNA, 21 nt, synthetic construct
  source 1..21: mol_type = other RNA
gatccagccttcaggaaattt

SEQ ID NO: 67 - RNA, 21 nt, synthetic construct
  source 1..21: mol_type = other RNA
agccttcaggaaattcagaat

SEQ ID NO: 68 - RNA, 21 nt, synthetic construct
  source 1..21: mol_type = other RNA
tcaggaaattcagaaccaact

SEQ ID NO: 69 - RNA, 21 nt, synthetic construct
  source 1..21: mol_type = other RNA
attcagaaccaactttgattt

SEQ ID NO: 70 - RNA, 21 nt, synthetic construct
  source 1..21: mol_type = other RNA
aaccaactttgatttcatgat

SEQ ID NO: 71 - RNA, 21 nt, synthetic construct
  source 1..21: mol_type = other RNA
tttgatttcatgatcctgaat

SEQ ID NO: 72 - RNA, 21 nt, synthetic construct
  source 1..21: mol_type = other RNA
ttcatgatcctgaacctgtct

SEQ ID NO: 73 - RNA, 21 nt, synthetic construct
  source 1..21: mol_type = other RNA
gatcctgaacctgtccttctt

SEQ ID NO: 74 - RNA, 21 nt, synthetic construct
  source 1..21: mol_type = other RNA
gaacctgtccttctgtgacct

SEQ ID NO: 75 - RNA, 21 nt, synthetic construct
  source 1..21: mol_type = other RNA
tgtccttctgtgacctcttct

SEQ ID NO: 76 - RNA, 21 nt, synthetic construct
  source 1..21: mol_type = other RNA
ttctgtgacctcttcatttgt

SEQ ID NO: 77 - RNA, 21 nt, synthetic construct
  source 1..21: mol_type = other RNA
gacctcttcatttgtggagtt

SEQ ID NO: 78 - RNA, 21 nt, synthetic construct
  source 1..21: mol_type = other RNA
cttcatttgtggagtgacagt

SEQ ID NO: 79 - RNA, 21 nt, synthetic construct
  source 1..21: mol_type = other RNA
catgttcacctttgtgttatt

SEQ ID NO: 80 - RNA, 21 nt, synthetic construct
  source 1..21: mol_type = other RNA
tcacctttgtgttattcttct

SEQ ID NO: 81 - RNA, 21 nt, synthetic construct
  source 1..21: mol_type = other RNA
tttgtgttattcttcagctct

SEQ ID NO: 82 - RNA, 21 nt, synthetic construct
  source 1..21: mol_type = other RNA
gttattcttcagctcagccat

SEQ ID NO: 83 - RNA, 21 nt, synthetic construct
  source 1..21: mol_type = other RNA
cagctcagccagtagtatcct

SEQ ID NO: 84 - RNA, 21 nt, synthetic construct
  source 1..21: mol_type = other RNA
cagccagtagtatcccggatt

SEQ ID NO: 85 - RNA, 21 nt, synthetic construct
  source 1..21: mol_type = other RNA
tagtatcccggatgctttctt

SEQ ID NO: 86 - RNA, 21 nt, synthetic construct
  source 1..21: mol_type = other RNA
tcccggatgctttctgcttct

SEQ ID NO: 87 - RNA, 21 nt, synthetic construct
  source 1..21: mol_type = other RNA
gatgctttctgcttcactttt

SEQ ID NO: 88 - RNA, 21 nt, synthetic construct
  source 1..21: mol_type = other RNA
tttctgcttcactttccatct

SEQ ID NO: 89 - RNA, 21 nt, synthetic construct
  source 1..21: mol_type = other RNA
cactttccatctcaccagttt

SEQ ID NO: 90 - RNA, 21 nt, synthetic construct
  source 1..21: mol_type = other RNA
ccatctcaccagttcaggctt

SEQ ID NO: 91 - RNA, 21 nt, synthetic construct
  source 1..21: mol_type = other RNA
tcaccagttcaggcttcatct

SEQ ID NO: 92 - RNA, 21 nt, synthetic construct
  source 1..21: mol_type = other RNA
agttcaggcttcatcatcatt

SEQ ID NO: 93 - RNA, 21 nt, synthetic construct
  source 1..21: mol_type = other RNA
aggcttcatcatcatgtctct

SEQ ID NO: 94 - RNA, 21 nt, synthetic construct
  source 1..21: mol_type = other RNA
tcatcatcatgtctctgaagt

SEQ ID NO: 95 - RNA, 21 nt, synthetic construct
  source 1..21: mol_type = other RNA
atcatgtctctgaagacagtt

SEQ ID NO: 96 - RNA, 21 nt, synthetic construct
  source 1..21: mol_type = other RNA
tctctgaagacagtggcagtt

SEQ ID NO: 97 - RNA, 21 nt, synthetic construct
  source 1..21: mol_type = other RNA
agtggcagtgatcgccctgct

SEQ ID NO: 98 - RNA, 21 nt, synthetic construct
  source 1..21: mol_type = other RNA
caccggctccggatggtgttt

SEQ ID NO: 99 - RNA, 21 nt, synthetic construct
  source 1..21: mol_type = other RNA
acagcctaatcgcacggcctt

SEQ ID NO: 100 - RNA, 21 nt, synthetic construct
  source 1..21: mol_type = other RNA
ctaatcgcacggcctcctttt

SEQ ID NO: 101 - RNA, 21 nt, synthetic construct
  source 1..21: mol_type = other RNA
cgcacggcctcctttccctgt

SEQ ID NO: 102 - RNA, 21 nt, synthetic construct
  source 1..21: mol_type = other RNA
cctcctttccctgcaccgtat

SEQ ID NO: 103 - RNA, 21 nt, synthetic construct
  source 1..21: mol_type = other RNA
tttccctgcaccgtactcctt

SEQ ID NO: 104 - RNA, 21 nt, synthetic construct
  source 1..21: mol_type = other RNA
tgcaccgtactcctcaccctt

SEQ ID NO: 105 - RNA, 21 nt, synthetic construct
  source 1..21: mol_type = other RNA
actcctcaccctgcttctctt

SEQ ID NO: 106 - RNA, 21 nt, synthetic construct
  source 1..21: mol_type = other RNA
accctgcttctctgggccact

SEQ ID NO: 107 - RNA, 21 nt, synthetic construct
  source 1..21: mol_type = other RNA
cttctctgggccaccagtttt

SEQ ID NO: 108 - RNA, 21 nt, synthetic construct
  source 1..21: mol_type = other RNA
ctgggccaccagtttcaccct

SEQ ID NO: 109 - RNA, 21 nt, synthetic construct
  source 1..21: mol_type = other RNA
caccagtttcacccttgccat

SEQ ID NO: 110 - RNA, 21 nt, synthetic construct
  source 1..21: mol_type = other RNA
tcacccttgccaccttggctt

SEQ ID NO: 111 - RNA, 21 nt, synthetic construct
  source 1..21: mol_type = other RNA
gccaccttggctaccttgaat

SEQ ID NO: 112 - RNA, 21 nt, synthetic construct
  source 1..21: mol_type = other RNA
cttggctaccttgaaaaccat

SEQ ID NO: 113 - RNA, 21 nt, synthetic construct
  source 1..21: mol_type = other RNA
taccttgaaaaccagcaagtt

SEQ ID NO: 114 - RNA, 21 nt, synthetic construct
  source 1..21: mol_type = other RNA
aaccagcaagtcccacctctt

SEQ ID NO: 115 - RNA, 21 nt, synthetic construct
  source 1..21: mol_type = other RNA
aagtcccacctctgtcttcct

SEQ ID NO: 116 - RNA, 21 nt, synthetic construct
  source 1..21: mol_type = other RNA
cacctctgtcttcccatgtct

SEQ ID NO: 117 - RNA, 21 nt, synthetic construct
  source 1..21: mol_type = other RNA
ctgtcttcccatgtccagtct

SEQ ID NO: 118 - RNA, 21 nt, synthetic construct
  source 1..21: mol_type = other RNA
ttcccatgtccagtctgattt

SEQ ID NO: 119 - RNA, 21 nt, synthetic construct
  source 1..21: mol_type = other RNA
ccagtctgattgctggaaaat

SEQ ID NO: 120 - RNA, 21 nt, synthetic construct
  source 1..21: mol_type = other RNA
tgattgctggaaaagggaaat

SEQ ID NO: 121 - RNA, 21 nt, synthetic construct
  source 1..21: mol_type = other RNA
ctggaaaagggaaagccattt

SEQ ID NO: 122 - RNA, 21 nt, synthetic construct
  source 1..21: mol_type = other RNA
aagggaaagccattttgtctt

SEQ ID NO: 123 - RNA, 21 nt, synthetic construct
  source 1..21: mol_type = other RNA
agccattttgtctctctatgt

SEQ ID NO: 124 - RNA, 21 nt, synthetic construct
  source 1..21: mol_type = other RNA
ttttgtctctctatgtggtct

SEQ ID NO: 125 - RNA, 21 nt, synthetic construct
  source 1..21: mol_type = other RNA
tctctctatgtggtcgacttt

SEQ ID NO: 126 - RNA, 21 nt, synthetic construct
  source 1..21: mol_type = other RNA
tgtggtcgacttcaccttctt

SEQ ID NO: 127 - RNA, 21 nt, synthetic construct
  source 1..21: mol_type = other RNA
cgacttcaccttctgtgttgt

SEQ ID NO: 128 - RNA, 21 nt, synthetic construct
  source 1..21: mol_type = other RNA
accttctgtgttgctgtggtt

SEQ ID NO: 129 - RNA, 21 nt, synthetic construct
  source 1..21: mol_type = other RNA
tgttgctgtggtctctgtctt

SEQ ID NO: 130 - RNA, 21 nt, synthetic construct
  source 1..21: mol_type = other RNA
tgtggtctctgtctcttacat

SEQ ID NO: 131 - RNA, 21 nt, synthetic construct
  source 1..21: mol_type = other RNA
tctctgtctcttacatcatgt

SEQ ID NO: 132 - RNA, 21 nt, synthetic construct
  source 1..21: mol_type = other RNA
tcttacatcatgattgctcat

SEQ ID NO: 133 - RNA, 21 nt, synthetic construct
  source 1..21: mol_type = other RNA
atcatgattgctcagaccctt

SEQ ID NO: 134 - RNA, 21 nt, synthetic construct
  source 1..21: mol_type = other RNA
agaccctgcggaagaacgctt

SEQ ID NO: 135 - RNA, 21 nt, synthetic construct
  source 1..21: mol_type = other RNA
tgcggaagaacgctcaagtct

SEQ ID NO: 136 - RNA, 21 nt, synthetic construct
  source 1..21: mol_type = other RNA
aagaacgctcaagtcagaaat

SEQ ID NO: 137 - RNA, 21 nt, synthetic construct
  source 1..21: mol_type = other RNA
cgctcaagtcagaaagtgcct

SEQ ID NO: 138 - RNA, 21 nt, synthetic construct
  source 1..21: mol_type = other RNA
gtaatcacagtcgatgcttct

SEQ ID NO: 139 - RNA, 21 nt, synthetic construct
  source 1..21: mol_type = other RNA
agtcgatgcttccagaccact

SEQ ID NO: 140 - RNA, 21 nt, synthetic construct
  source 1..21: mol_type = other RNA
gcttccagaccacagcctttt

SEQ ID NO: 141 - RNA, 21 nt, synthetic construct
  source 1..21: mol_type = other RNA
cagaccacagcctttcatggt

SEQ ID NO: 142 - RNA, 21 nt, synthetic construct
  source 1..21: mol_type = other RNA
gtggagatcccatccagtgtt

SEQ ID NO: 143 - RNA, 21 nt, synthetic construct
  source 1..21: mol_type = other RNA
gatcccatccagtgtgccatt

SEQ ID NO: 144 - RNA, 21 nt, synthetic construct
  source 1..21: mol_type = other RNA
tgccggctctgtataggaact

SEQ ID NO: 145 - RNA, 21 nt, synthetic construct
  source 1..21: mol_type = other RNA
gctctgtataggaaccagaat

SEQ ID NO: 146 - RNA, 21 nt, synthetic construct
  source 1..21: mol_type = other RNA
gtataggaaccagaattacat

SEQ ID NO: 147 - RNA, 21 nt, synthetic construct
  source 1..21: mol_type = other RNA
gaaccagaattacaacaaact

SEQ ID NO: 148 - RNA, 21 nt, synthetic construct
  source 1..21: mol_type = other RNA
aattacaacaaactgcagcat

SEQ ID NO: 149 - RNA, 21 nt, synthetic construct
  source 1..21: mol_type = other RNA
aacaaactgcagcacgttcat

SEQ ID NO: 150 - RNA, 21 nt, synthetic construct
  source 1..21: mol_type = other RNA
ctgcagcacgttcagacccgt

SEQ ID NO: 151 - RNA, 21 nt, synthetic construct
  source 1..21: mol_type = other RNA
cacgttcagacccgtggatat

SEQ ID NO: 152 - RNA, 21 nt, synthetic construct
  source 1..21: mol_type = other RNA
cagacccgtggatataccaat

SEQ ID NO: 153 - RNA, 21 nt, synthetic construct
  source 1..21: mol_type = other RNA
ccgtggatataccaagagtct

SEQ ID NO: 154 - RNA, 21 nt, synthetic construct
  source 1..21: mol_type = other RNA
gatataccaagagtcccaact

SEQ ID NO: 155 - RNA, 21 nt, synthetic construct
  source 1..21: mol_type = other RNA
accaagagtcccaaccaactt

SEQ ID NO: 156 - RNA, 21 nt, synthetic construct
  source 1..21: mol_type = other RNA
agtcccaaccaactggtcact

SEQ ID NO: 157 - RNA, 21 nt, synthetic construct
  source 1..21: mol_type = other RNA
gcaagccgactccagctcgtt

SEQ ID NO: 158 - RNA, 21 nt, synthetic construct
  source 1..21: mol_type = other RNA
cgactccagctcgtatcagct

SEQ ID NO: 159 - RNA, 21 nt, synthetic construct
  source 1..21: mol_type = other RNA
ctcgtatcagccatcaacctt

SEQ ID NO: 160 - RNA, 21 nt, synthetic construct
  source 1..21: mol_type = other RNA
agccatcaacctctccactgt

SEQ ID NO: 161 - RNA, 21 nt, synthetic construct
  source 1..21: mol_type = other RNA
tcaacctctccactgccaagt

SEQ ID NO: 162 - RNA, 21 nt, synthetic construct
  source 1..21: mol_type = other RNA
ctctccactgccaaggattct

SEQ ID NO: 163 - RNA, 21 nt, synthetic construct
  source 1..21: mol_type = other RNA
tgccaaggattccaaagccgt

SEQ ID NO: 164 - RNA, 21 nt, synthetic construct
  source 1..21: mol_type = other RNA
gattccaaagccgtggtcact

SEQ ID NO: 165 - RNA, 21 nt, synthetic construct
  source 1..21: mol_type = other RNA
aaagccgtggtcacctgtgtt

SEQ ID NO: 166 - RNA, 21 nt, synthetic construct
  source 1..21: mol_type = other RNA
tggtcacctgtgtgatcattt

SEQ ID NO: 167 - RNA, 21 nt, synthetic construct
  source 1..21: mol_type = other RNA
acctgtgtgatcattgtgctt

SEQ ID NO: 168 - RNA, 21 nt, synthetic construct
  source 1..21: mol_type = other RNA
gtgatcattgtgctgtcagtt

SEQ ID NO: 169 - RNA, 21 nt, synthetic construct
  source 1..21: mol_type = other RNA
gtgctgtcagtcctggtgtgt

SEQ ID NO: 170 - RNA, 21 nt, synthetic construct
  source 1..21: mol_type = other RNA
tcagtcctggtgtgctgtctt

SEQ ID NO: 171 - RNA, 21 nt, synthetic construct
  source 1..21: mol_type = other RNA
ctggtgtgctgtcttccactt

SEQ ID NO: 172 - RNA, 21 nt, synthetic construct
  source 1..21: mol_type = other RNA
tttccttggtacaggtggttt

SEQ ID NO: 173 - RNA, 21 nt, synthetic construct
  source 1..21: mol_type = other RNA
ttggtacaggtggttctctct

SEQ ID NO: 174 - RNA, 21 nt, synthetic construct
  source 1..21: mol_type = other RNA
gtggttctctccagcaatggt

SEQ ID NO: 175 - RNA, 21 nt, synthetic construct
  source 1..21: mol_type = other RNA
tctccagcaatgggagcttct

SEQ ID NO: 176 - RNA, 21 nt, synthetic construct
  source 1..21: mol_type = other RNA
aatgggagcttcattctttat

SEQ ID NO: 177 - RNA, 21 nt, synthetic construct
  source 1..21: mol_type = other RNA
ttcattctttaccagtttgat

SEQ ID NO: 178 - RNA, 21 nt, synthetic construct
  source 1..21: mol_type = other RNA
ctttaccagtttgaattgttt

SEQ ID NO: 179 - RNA, 21 nt, synthetic construct
  source 1..21: mol_type = other RNA
cagtttgaattgtttggattt

SEQ ID NO: 180 - RNA, 21 nt, synthetic construct
  source 1..21: mol_type = other RNA
aattgtttggatttactcttt

SEQ ID NO: 181 - RNA, 21 nt, synthetic construct
  source 1..21: mol_type = other RNA
tcttatatttttcaagtcagt

SEQ ID NO: 182 - RNA, 21 nt, synthetic construct
  source 1..21: mol_type = other RNA
tttcaagtcaggattaaacct

SEQ ID NO: 183 - RNA, 21 nt, synthetic construct
  source 1..21: mol_type = other RNA
gtcaggattaaacccttttat

SEQ ID NO: 184 - RNA, 21 nt, synthetic construct
  source 1..21: mol_type = other RNA
aacccttttatatattctcgt

SEQ ID NO: 185 - RNA, 21 nt, synthetic construct
  source 1..21: mol_type = other RNA
ttttatatattctcggaacat

SEQ ID NO: 186 - RNA, 21 nt, synthetic construct
  source 1..21: mol_type = other RNA
tatattctcggaacagtgcat

SEQ ID NO: 187 - RNA, 21 nt, synthetic construct
  source 1..21: mol_type = other RNA
tctcggaacagtgcagggctt

SEQ ID NO: 188 - RNA, 21 nt, synthetic construct
  source 1..21: mol_type = other RNA
gcagggctgagaaggaaagtt

SEQ ID NO: 189 - RNA, 21 nt, synthetic construct
  source 1..21: mol_type = other RNA
gctgagaaggaaagtgctctt

SEQ ID NO: 190 - RNA, 21 nt, synthetic construct
  source 1..21: mol_type = other RNA
gaaggaaagtgctctggtgct

SEQ ID NO: 191 - RNA, 21 nt, synthetic construct
  source 1..21: mol_type = other RNA
ctggtgcctccaatacatagt

SEQ ID NO: 192 - RNA, 21 nt, synthetic construct
  source 1..21: mol_type = other RNA
cctccaatacataggcctggt

SEQ ID NO: 193 - RNA, 21 nt, synthetic construct
  source 1..21: mol_type = other RNA
aatacataggcctgggttttt

SEQ ID NO: 194 - RNA, 21 nt, synthetic construct
  source 1..21: mol_type = other RNA
tttctgctgcaaacaaaagat

SEQ ID NO: 195 - RNA, 21 nt, synthetic construct
  source 1..21: mol_type = other RNA
tgcaaacaaaagactcgactt

SEQ ID NO: 196 - RNA, 21 nt, synthetic construct
  source 1..21: mol_type = other RNA
acaaaagactcgacttcgagt

SEQ ID NO: 197 - RNA, 21 nt, synthetic construct
  source 1..21: mol_type = other RNA
agactcgacttcgagccatgt

SEQ ID NO: 198 - RNA, 21 nt, synthetic construct
  source 1..21: mol_type = other RNA
gacttcgagccatgggaaaat

SEQ ID NO: 199 - RNA, 21 nt, synthetic construct
  source 1..21: mol_type = other RNA
cgagccatgggaaaagggaat

SEQ ID NO: 200 - RNA, 21 nt, synthetic construct
  source 1..21: mol_type = other RNA
catgggaaaagggaacctcgt

SEQ ID NO: 201 - RNA, 21 nt, synthetic construct
  source 1..21: mol_type = other RNA
aaagggaacctcgaagtcaat

SEQ ID NO: 202 - RNA, 21 nt, synthetic construct
  source 1..21: mol_type = other RNA
aacctcgaagtcaacagaaat

SEQ ID NO: 203 - RNA, 21 nt, synthetic construct
  source 1..21: mol_type = other RNA
gaagtcaacagaaacaaatct

SEQ ID NO: 204 - RNA, 21 nt, synthetic construct
  source 1..21: mol_type = other RNA
caacagaaacaaatcctccct

SEQ ID NO: 205 - RNA, 21 nt, synthetic construct
  source 1..21: mol_type = other RNA
aaacaaatcctcccatcatgt

SEQ ID NO: 206 - RNA, 21 nt, synthetic construct
  source 1..21: mol_type = other RNA
atcctcccatcatgaaacaat

SEQ ID NO: 207 - RNA, 21 nt, synthetic construct
  source 1..21: mol_type = other RNA
cccatcatgaaacaaactctt

SEQ ID NO: 208 - RNA, 21 nt, synthetic construct
  source 1..21: mol_type = other RNA
atgaaacaaactctgcctact

SEQ ID NO: 209 - RNA, 21 nt, synthetic construct
  source 1..21: mol_type = other RNA
actctgcctacatgttatctt

SEQ ID NO: 210 - RNA, 21 nt, synthetic construct
  source 1..21: mol_type = other RNA
gcctacatgttatctccaaat

SEQ ID NO: 211 - RNA, 21 nt, synthetic construct
  source 1..21: mol_type = other RNA
catgttatctccaaagccact

SEQ ID NO: 212 - RNA, 21 nt, synthetic construct
  source 1..21: mol_type = other RNA
tccaaagccacagaagaaatt

SEQ ID NO: 213 - RNA, 21 nt, synthetic construct
  source 1..21: mol_type = other RNA
agccacagaagaaatttgtgt

SEQ ID NO: 214 - RNA, 21 nt, synthetic construct
  source 1..21: mol_type = other RNA
cagaagaaatttgtggaccat

SEQ ID NO: 215 - RNA, 21 nt, synthetic construct
  source 1..21: mol_type = other RNA
gaaatttgtggaccaggcttt

SEQ ID NO: 216 - RNA, 21 nt, synthetic construct
  source 1..21: mol_type = other RNA
accaggcttgtggcccaagtt

SEQ ID NO: 217 - RNA, 21 nt, synthetic construct
  source 1..21: mol_type = other RNA
tgtggcccaagtcattcaaat

SEQ ID NO: 218 - RNA, 21 nt, synthetic construct
  source 1..21: mol_type = other RNA
cccaagtcattcaaaagaaat

SEQ ID NO: 219 - RNA, 21 nt, synthetic construct
  source 1..21: mol_type = other RNA
cattcaaaagaaagtatggtt

SEQ ID NO: 220 - RNA, 21 nt, synthetic construct
  source 1..21: mol_type = other RNA
aaaagaaagtatggtgagtct

SEQ ID NO: 221 - RNA, 21 nt, synthetic construct
  source 1..21: mol_type = other RNA
agtatggtgagtcccaagatt

SEQ ID NO: 222 - RNA, 21 nt, synthetic construct
  source 1..21: mol_type = other RNA
tgagtcccaagatctctgctt

SEQ ID NO: 223 - RNA, 21 nt, synthetic construct
  source 1..21: mol_type = other RNA
cccaagatctctgctggacat

SEQ ID NO: 224 - RNA, 21 nt, synthetic construct
  source 1..21: mol_type = other RNA
gatctctgctggacatcaact

SEQ ID NO: 225 - RNA, 21 nt, synthetic construct
  source 1..21: mol_type = other RNA
ctgctggacatcaacactgtt

SEQ ID NO: 226 - RNA, 21 nt, synthetic construct
  source 1..21: mol_type = other RNA
gacatcaacactgtggtcagt

SEQ ID NO: 227 - RNA, 21 nt, synthetic construct
  source 1..21: mol_type = other RNA
acactgtggtcagagcagctt

SEQ ID NO: 228 - RNA, 21 nt, synthetic construct
  source 1..21: mol_type = other RNA
caacactcggattgaaccttt

SEQ ID NO: 229 - RNA, 21 nt, synthetic construct
  source 1..21: mol_type = other RNA
ctcggattgaaccttactact

SEQ ID NO: 230 - RNA, 21 nt, synthetic construct
  source 1..21: mol_type = other RNA
ttgaaccttactacagcatct

SEQ ID NO: 231 - RNA, 21 nt, synthetic construct
  source 1..21: mol_type = other RNA
ccttactacagcatctataat

SEQ ID NO: 232 - RNA, 21 nt, synthetic construct
  source 1..21: mol_type = other RNA
ctacagcatctataacagcat

SEQ ID NO: 233 - RNA, 21 nt, synthetic construct
  source 1..21: mol_type = other RNA
catctataacagcagcccttt

SEQ ID NO: 234 - RNA, 21 nt, synthetic construct
  source 1..21: mol_type = other RNA
gagagcagcccatgtaacttt

SEQ ID NO: 235 - RNA, 21 nt, synthetic construct
  source 1..21: mol_type = other RNA
cagcccatgtaacttacagct

SEQ ID NO: 236 - RNA, 21 nt, synthetic construct
  source 1..21: mol_type = other RNA
atgtaacttacagccagtaat

SEQ ID NO: 237 - RNA, 21 nt, synthetic construct
  source 1..21: mol_type = other RNA
cttacagccagtaaactcttt

SEQ ID NO: 238 - RNA, 21 nt, synthetic construct
  source 1..21: mol_type = other RNA
ccagtaaactcttttggattt

SEQ ID NO: 239 - RNA, 21 nt, synthetic construct
  source 1..21: mol_type = other RNA
actcttttggatttgccaatt

SEQ ID NO: 240 - RNA, 21 nt, synthetic construct
  source 1..21: mol_type = other RNA
gatttgccaattcatatattt

SEQ ID NO: 241 - RNA, 21 nt, synthetic construct
  source 1..21: mol_type = other RNA
attcatatattgccatgcatt

SEQ ID NO: 242 - RNA, 21 nt, synthetic construct
  source 1..21: mol_type = other RNA
atattgccatgcattatcact

SEQ ID NO: 243 - RNA, 21 nt, synthetic construct
  source 1..21: mol_type = other RNA
atgcattatcacaccactaat

SEQ ID NO: 244 - RNA, 21 nt, synthetic construct
  source 1..21: mol_type = other RNA
tatcacaccactaatgacttt

SEQ ID NO: 245 - RNA, 21 nt, synthetic construct
  source 1..21: mol_type = other RNA
caccactaatgacttagtgct

SEQ ID NO: 246 - RNA, 21 nt, synthetic construct
  source 1..21: mol_type = other RNA
aatgacttagtgcaggaatat

SEQ ID NO: 247 - RNA, 21 nt, synthetic construct
  source 1..21: mol_type = other RNA
ttagtgcaggaatatgacagt

SEQ ID NO: 248 - RNA, 21 nt, synthetic construct
  source 1..21: mol_type = other RNA
gcaggaatatgacagcacttt

SEQ ID NO: 249 - RNA, 21 nt, synthetic construct
  source 1..21: mol_type = other RNA
tatgacagcacttcagccaat

SEQ ID NO: 250 - RNA, 21 nt, synthetic construct
  source 1..21: mol_type = other RNA
cacttcagccaagcagattct

SEQ ID NO: 251 - RNA, 21 nt, synthetic construct
  source 1..21: mol_type = other RNA
cagccaagcagattccagtct

SEQ ID NO: 252 - RNA, 21 nt, synthetic construct
  source 1..21: mol_type = other RNA
ctccgtttaaagtcatggagt

SEQ ID NO: 253 - RNA, 21 nt, synthetic construct
  source 1..21: mol_type = other RNA
aaagtcatggaggctataggt

SEQ ID NO: 254 - RNA, 21 nt, synthetic construct
  source 1..21: mol_type = other RNA
ggaggctataggatcttatgt

SEQ ID NO: 255 - RNA, 21 nt, synthetic construct
  source 1..21: mol_type = other RNA
ctataggatcttatgtaaact

SEQ ID NO: 256 - RNA, 21 nt, synthetic construct
  source 1..21: mol_type = other RNA
ggatcttatgtaaacagtttt

SEQ ID NO: 257 - RNA, 21 nt, synthetic construct
  source 1..21: mol_type = other RNA
aaacagtttttgtttctgatt

SEQ ID NO: 258 - RNA, 21 nt, synthetic construct
  source 1..21: mol_type = other RNA
gtttttgtttctgatagtaat

SEQ ID NO: 259 - RNA, 21 nt, synthetic construct
  source 1..21: mol_type = other RNA
tgtttctgatagtaatggact

SEQ ID NO: 260 - RNA, 21 nt, synthetic construct
  source 1..21: mol_type = other RNA
ctgatagtaatggactttatt

SEQ ID NO: 261 - RNA, 21 nt, synthetic construct
  source 1..21: mol_type = other RNA
aatggactttattctaacttt

SEQ ID NO: 262 - RNA, 21 nt, synthetic construct
  source 1..21: mol_type = other RNA
tttattctaacttgagatcat

SEQ ID NO: 263 - RNA, 21 nt, synthetic construct
  source 1..21: mol_type = other RNA
tctaacttgagatcagtggct

SEQ ID NO: 264 - RNA, 21 nt, synthetic construct
  source 1..21: mol_type = other RNA
gagatcagtggcggatcaaat

SEQ ID NO: 265 - RNA, 21 nt, synthetic construct
  source 1..21: mol_type = other RNA
cagtggcggatcaaaacctat

SEQ ID NO: 266 - RNA, 21 nt, synthetic construct
  source 1..21: mol_type = other RNA
ggatcaaaacctacaagattt

SEQ ID NO: 267 - RNA, 21 nt, synthetic construct
  source 1..21: mol_type = other RNA
aaaacctacaagattcaactt

SEQ ID NO: 268 - RNA, 21 nt, synthetic construct
  source 1..21: mol_type = other RNA
ctacaagattcaactgaaaat

SEQ ID NO: 269 - RNA, 21 nt, synthetic construct
  source 1..21: mol_type = other RNA
agattcaactgaaaagttggt

SEQ ID NO: 270 - RNA, 21 nt, synthetic construct
  source 1..21: mol_type = other RNA
aactgaaaagttggcagttat

SEQ ID NO: 271 - RNA, 21 nt, synthetic construct
  source 1..21: mol_type = other RNA
aaagttggcagttatggtttt

SEQ ID NO: 272 - RNA, 21 nt, synthetic construct
  source 1..21: mol_type = other RNA
tggcagttatggttttctttt

SEQ ID NO: 273 - RNA, 21 nt, synthetic construct
  source 1..21: mol_type = other RNA
gttatggttttctttcatctt

SEQ ID NO: 274 - RNA, 21 nt, synthetic construct
  source 1..21: mol_type = other RNA
ttctttcatctgatgtgtcat

SEQ ID NO: 275 - RNA, 21 nt, synthetic construct
  source 1..21: mol_type = other RNA
catctgatgtgtcagtatctt

SEQ ID NO: 276 - RNA, 21 nt, synthetic construct
  source 1..21: mol_type = other RNA
atgtgtcagtatctgttgatt

SEQ ID NO: 277 - RNA, 21 nt, synthetic construct
  source 1..21: mol_type = other RNA
cagtatctgttgatttgcttt

SEQ ID NO: 278 - RNA, 21 nt, synthetic construct
  source 1..21: mol_type = other RNA
gttgatttgctttgtagtttt

SEQ ID NO: 279 - RNA, 21 nt, synthetic construct
  source 1..21: mol_type = other RNA
gctttgtagtttgttgacatt

SEQ ID NO: 280 - RNA, 21 nt, synthetic construct
  source 1..21: mol_type = other RNA
gtagtttgttgacatcttaat

SEQ ID NO: 281 - RNA, 21 nt, synthetic construct
  source 1..21: mol_type = other RNA
ttgttgacatcttaagatttt

SEQ ID NO: 282 - RNA, 21 nt, synthetic construct
  source 1..21: mol_type = other RNA
gacatcttaagatttgatgtt

SEQ ID NO: 283 - RNA, 21 nt, synthetic construct
  source 1..21: mol_type = other RNA
ttaagatttgatgtgaaagtt

SEQ ID NO: 284 - RNA, 21 nt, synthetic construct
  source 1..21: mol_type = other RNA
tttgatgtgaaagttttagat

SEQ ID NO: 285 - RNA, 21 nt, synthetic construct
  source 1..21: mol_type = other RNA
atggcgatgatgcctctagta

SEQ ID NO: 286 - RNA, 21 nt, synthetic construct
  source 1..21: mol_type = other RNA
tgatgcctctagtcctgcata

SEQ ID NO: 287 - RNA, 21 nt, synthetic construct
  source 1..21: mol_type = other RNA
cctctagtcctgcatcatcca

SEQ ID NO: 288 - RNA, 21 nt, synthetic construct
  source 1..21: mol_type = other RNA
gtcctgcatcatccagagcga

SEQ ID NO: 289 - RNA, 21 nt, synthetic construct
  source 1..21: mol_type = other RNA
ccggactgcgagatggaggaa

SEQ ID NO: 290 - RNA, 21 nt, synthetic construct
  source 1..21: mol_type = other RNA
cacccggcaggcttatctgta

SEQ ID NO: 291 - RNA, 21 nt, synthetic construct
  source 1..21: mol_type = other RNA
ggcaggcttatctgtcttgga

SEQ ID NO: 292 - RNA, 21 nt, synthetic construct
  source 1..21: mol_type = other RNA
atctgtcttgggcctctttta

SEQ ID NO: 293 - RNA, 21 nt, synthetic construct
  source 1..21: mol_type = other RNA
tcttgggcctcttttgtcaca

SEQ ID NO: 294 - RNA, 21 nt, synthetic construct
  source 1..21: mol_type = other RNA
ggcctcttttgtcacatatta

SEQ ID NO: 295 - RNA, 21 nt, synthetic construct
  source 1..21: mol_type = other RNA
ttttgtcacatattgctcata

SEQ ID NO: 296 - RNA, 21 nt, synthetic construct
  source 1..21: mol_type = other RNA
cacatattgctcatctgtgaa

SEQ ID NO: 297 - RNA, 21 nt, synthetic construct
  source 1..21: mol_type = other RNA
attgctcatctgtgagctgaa

SEQ ID NO: 298 - RNA, 21 nt, synthetic construct
  source 1..21: mol_type = other RNA
catctgtgagctgaggcccta

SEQ ID NO: 299 - RNA, 21 nt, synthetic construct
  source 1..21: mol_type = other RNA
ggccctgactcactgagtata

SEQ ID NO: 300 - RNA, 21 nt, synthetic construct
  source 1..21: mol_type = other RNA
tgactcactgagtatttttga

SEQ ID NO: 301 - RNA, 21 nt, synthetic construct
  source 1..21: mol_type = other RNA
gagcagaagaaggagacatta

SEQ ID NO: 302 - RNA, 21 nt, synthetic construct
  source 1..21: mol_type = other RNA
gaagaaggagacatttctcta

SEQ ID NO: 303 - RNA, 21 nt, synthetic construct
  source 1..21: mol_type = other RNA
ggagacatttctctccgaaaa

SEQ ID NO: 304 - RNA, 21 nt, synthetic construct
  source 1..21: mol_type = other RNA
tttctctccgaaaatgaacta

SEQ ID NO: 305 - RNA, 21 nt, synthetic construct
  source 1..21: mol_type = other RNA
ctccgaaaatgaactcaacaa

SEQ ID NO: 306 - RNA, 21 nt, synthetic construct
  source 1..21: mol_type = other RNA
aaaatgaactcaacaggccaa

SEQ ID NO: 307 - RNA, 21 nt, synthetic construct
  source 1..21: mol_type = other RNA
gaactcaacaggccaccttca

SEQ ID NO: 308 - RNA, 21 nt, synthetic construct
  source 1..21: mol_type = other RNA
acaggccaccttcaggatgca

SEQ ID NO: 309 - RNA, 21 nt, synthetic construct
  source 1..21: mol_type = other RNA
ccacctcgctccatgtgccta

SEQ ID NO: 310 - RNA, 21 nt, synthetic construct
  source 1..21: mol_type = other RNA
tcgctccatgtgcctcactca

SEQ ID NO: 311 - RNA, 21 nt, synthetic construct
  source 1..21: mol_type = other RNA
atgtgcctcactcacaggaaa

SEQ ID NO: 312 - RNA, 21 nt, synthetic construct
  source 1..21: mol_type = other RNA
cctcactcacaggaaggaaaa

SEQ ID NO: 313 - RNA, 21 nt, synthetic construct
  source 1..21: mol_type = other RNA
acaggaaggaaacagcaccta

SEQ ID NO: 314 - RNA, 21 nt, synthetic construct
  source 1..21: mol_type = other RNA
aaggaaacagcacctctctca

SEQ ID NO: 315 - RNA, 21 nt, synthetic construct
  source 1..21: mol_type = other RNA
ctctccaggagggtcttcaga

SEQ ID NO: 316 - RNA, 21 nt, synthetic construct
  source 1..21: mol_type = other RNA
caggagggtcttcaggatcta

SEQ ID NO: 317 - RNA, 21 nt, synthetic construct
  source 1..21: mol_type = other RNA
ggtcttcaggatctcatccaa

SEQ ID NO: 318 - RNA, 21 nt, synthetic construct
  source 1..21: mol_type = other RNA
tcaggatctcatccacacaga

SEQ ID NO: 319 - RNA, 21 nt, synthetic construct
  source 1..21: mol_type = other RNA
tcatccacacagccaccttga

SEQ ID NO: 320 - RNA, 21 nt, synthetic construct
  source 1..21: mol_type = other RNA
cacacagccaccttggtgaca

SEQ ID NO: 321 - RNA, 21 nt, synthetic construct
  source 1..21: mol_type = other RNA
agccaccttggtgacctgtaa

SEQ ID NO: 322 - RNA, 21 nt, synthetic construct
  source 1..21: mol_type = other RNA
ccttggtgacctgtactttta

SEQ ID NO: 323 - RNA, 21 nt, synthetic construct
  source 1..21: mol_type = other RNA
gtgacctgtacttttctacta

SEQ ID NO: 324 - RNA, 21 nt, synthetic construct
  source 1..21: mol_type = other RNA
acttttctactggcggtcata

SEQ ID NO: 325 - RNA, 21 nt, synthetic construct
  source 1..21: mol_type = other RNA
tctactggcggtcatcttcta

SEQ ID NO: 326 - RNA, 21 nt, synthetic construct
  source 1..21: mol_type = other RNA
ggtcatcttctgcctgggtta

SEQ ID NO: 327 - RNA, 21 nt, synthetic construct
  source 1..21: mol_type = other RNA
ttctgcctgggttcctatgga

SEQ ID NO: 328 - RNA, 21 nt, synthetic construct
  source 1..21: mol_type = other RNA
cctgggttcctatggcaacta

SEQ ID NO: 329 - RNA, 21 nt, synthetic construct
  source 1..21: mol_type = other RNA
gttcctatggcaacttcatta

SEQ ID NO: 330 - RNA, 21 nt, synthetic construct
  source 1..21: mol_type = other RNA
tatggcaacttcattgtctta

SEQ ID NO: 331 - RNA, 21 nt, synthetic construct
  source 1..21: mol_type = other RNA
caacttcattgtcttcttgta

SEQ ID NO: 332 - RNA, 21 nt, synthetic construct
  source 1..21: mol_type = other RNA
tcattgtcttcttgtccttca

SEQ ID NO: 333 - RNA, 21 nt, synthetic construct
  source 1..21: mol_type = other RNA
gtcttcttgtccttcttcgaa

SEQ ID NO: 334 - RNA, 21 nt, synthetic construct
  source 1..21: mol_type = other RNA
cttgtccttcttcgatccaga

SEQ ID NO: 335 - RNA, 21 nt, synthetic construct
  source 1..21: mol_type = other RNA
ccttcttcgatccagccttca

SEQ ID NO: 336 - RNA, 21 nt, synthetic construct
  source 1..21: mol_type = other RNA
gatccagccttcaggaaatta

SEQ ID NO: 337 - RNA, 21 nt, synthetic construct
  source 1..21: mol_type = other RNA
agccttcaggaaattcagaaa

SEQ ID NO: 338 - RNA, 21 nt, synthetic construct
  source 1..21: mol_type = other RNA
tcaggaaattcagaaccaaca

SEQ ID NO: 339 - RNA, 21 nt, synthetic construct
  source 1..21: mol_type = other RNA
attcagaaccaactttgatta

SEQ ID NO: 340 - RNA, 21 nt, synthetic construct
  source 1..21: mol_type = other RNA
aaccaactttgatttcatgaa

SEQ ID NO: 341 - RNA, 21 nt, synthetic construct
  source 1..21: mol_type = other RNA
tttgatttcatgatcctgaaa

SEQ ID NO: 342 - RNA, 21 nt, synthetic construct
  source 1..21: mol_type = other RNA
ttcatgatcctgaacctgtca

SEQ ID NO: 343 - RNA, 21 nt, synthetic construct
  source 1..21: mol_type = other RNA
gatcctgaacctgtccttcta

SEQ ID NO: 344 - RNA, 21 nt, synthetic construct
  source 1..21: mol_type = other RNA
gaacctgtccttctgtgacca

SEQ ID NO: 345 - RNA, 21 nt, synthetic construct
  source 1..21: mol_type = other RNA
tgtccttctgtgacctcttca

SEQ ID NO: 346 - RNA, 21 nt, synthetic construct
  source 1..21: mol_type = other RNA
ttctgtgacctcttcatttga

SEQ ID NO: 347 - RNA, 21 nt, synthetic construct
  source 1..21: mol_type = other RNA
gacctcttcatttgtggagta

SEQ ID NO: 348 - RNA, 21 nt, synthetic construct
  source 1..21: mol_type = other RNA
cttcatttgtggagtgacaga

SEQ ID NO: 349 - RNA, 21 nt, synthetic construct
  source 1..21: mol_type = other RNA
catgttcacctttgtgttata

SEQ ID NO: 350 - RNA, 21 nt, synthetic construct
  source 1..21: mol_type = other RNA
tcacctttgtgttattcttca

SEQ ID NO: 351 - RNA, 21 nt, synthetic construct
  source 1..21: mol_type = other RNA
tttgtgttattcttcagctca

SEQ ID NO: 352 - RNA, 21 nt, synthetic construct
  source 1..21: mol_type = other RNA
gttattcttcagctcagccaa

SEQ ID NO: 353 - RNA, 21 nt, synthetic construct
  source 1..21: mol_type = other RNA
cagctcagccagtagtatcca

SEQ ID NO: 354 - RNA, 21 nt, synthetic construct
  source 1..21: mol_type = other RNA
cagccagtagtatcccggata

SEQ ID NO: 355 - RNA, 21 nt, synthetic construct
  source 1..21: mol_type = other RNA
tagtatcccggatgctttcta

SEQ ID NO: 356 - RNA, 21 nt, synthetic construct
  source 1..21: mol_type = other RNA
tcccggatgctttctgcttca

SEQ ID NO: 357 - RNA, 21 nt, synthetic construct
  source 1..21: mol_type = other RNA
gatgctttctgcttcacttta

SEQ ID NO: 358 - RNA, 21 nt, synthetic construct
  source 1..21: mol_type = other RNA
tttctgcttcactttccatca

SEQ ID NO: 359 - RNA, 21 nt, synthetic construct
  source 1..21: mol_type = other RNA
cactttccatctcaccagtta

SEQ ID NO: 360 - RNA, 21 nt, synthetic construct
  source 1..21: mol_type = other RNA
ccatctcaccagttcaggcta

SEQ ID NO: 361 - RNA, 21 nt, synthetic construct
  source 1..21: mol_type = other RNA
tcaccagttcaggcttcatca

SEQ ID NO: 362 - RNA, 21 nt, synthetic construct
  source 1..21: mol_type = other RNA
agttcaggcttcatcatcata

SEQ ID NO: 363 - RNA, 21 nt, synthetic construct
  source 1..21: mol_type = other RNA
aggcttcatcatcatgtctca

SEQ ID NO: 364 - RNA, 21 nt, synthetic construct
  source 1..21: mol_type = other RNA
tcatcatcatgtctctgaaga

SEQ ID NO: 365 - RNA, 21 nt, synthetic construct
  source 1..21: mol_type = other RNA
atcatgtctctgaagacagta

SEQ ID NO: 366 - RNA, 21 nt, synthetic construct
  source 1..21: mol_type = other RNA
tctctgaagacagtggcagta

SEQ ID NO: 367 - RNA, 21 nt, synthetic construct
  source 1..21: mol_type = other RNA
agtggcagtgatcgccctgca

SEQ ID NO: 368 - RNA, 21 nt, synthetic construct
  source 1..21: mol_type = other RNA
caccggctccggatggtgtta

SEQ ID NO: 369 - RNA, 21 nt, synthetic construct
  source 1..21: mol_type = other RNA
acagcctaatcgcacggccta

SEQ ID NO: 370 - RNA, 21 nt, synthetic construct
  source 1..21: mol_type = other RNA
ctaatcgcacggcctccttta

SEQ ID NO: 371 - RNA, 21 nt, synthetic construct
  source 1..21: mol_type = other RNA
cgcacggcctcctttccctga

SEQ ID NO: 372 - RNA, 21 nt, synthetic construct
  source 1..21: mol_type = other RNA
cctcctttccctgcaccgtaa

SEQ ID NO: 373 - RNA, 21 nt, synthetic construct
  source 1..21: mol_type = other RNA
tttccctgcaccgtactccta

SEQ ID NO: 374 - RNA, 21 nt, synthetic construct
  source 1..21: mol_type = other RNA
tgcaccgtactcctcacccta

SEQ ID NO: 375 - RNA, 21 nt, synthetic construct
  source 1..21: mol_type = other RNA
actcctcaccctgcttctcta

SEQ ID NO: 376 - RNA, 21 nt, synthetic construct
  source 1..21: mol_type = other RNA
accctgcttctctgggccaca

SEQ ID NO: 377 - RNA, 21 nt, synthetic construct
  source 1..21: mol_type = other RNA
cttctctgggccaccagttta

SEQ ID NO: 378 - RNA, 21 nt, synthetic construct
  source 1..21: mol_type = other RNA
ctgggccaccagtttcaccca

SEQ ID NO: 379 - RNA, 21 nt, synthetic construct
  source 1..21: mol_type = other RNA
caccagtttcacccttgccaa

SEQ ID NO: 380 - RNA, 21 nt, synthetic construct
  source 1..21: mol_type = other RNA
tcacccttgccaccttggcta

SEQ ID NO: 381 - RNA, 21 nt, synthetic construct
  source 1..21: mol_type = other RNA
gccaccttggctaccttgaaa

SEQ ID NO: 382 - RNA, 21 nt, synthetic construct
  source 1..21: mol_type = other RNA
cttggctaccttgaaaaccaa

SEQ ID NO: 383 - RNA, 21 nt, synthetic construct
  source 1..21: mol_type = other RNA
taccttgaaaaccagcaagta

SEQ ID NO: 384 - RNA, 21 nt, synthetic construct
  source 1..21: mol_type = other RNA
aaccagcaagtcccacctcta

SEQ ID NO: 385 - RNA, 21 nt, synthetic construct
  source 1..21: mol_type = other RNA
aagtcccacctctgtcttcca

SEQ ID NO: 386 - RNA, 21 nt, synthetic construct
  source 1..21: mol_type = other RNA
cacctctgtcttcccatgtca

SEQ ID NO: 387 - RNA, 21 nt, synthetic construct
  source 1..21: mol_type = other RNA
ctgtcttcccatgtccagtca

SEQ ID NO: 388 - RNA, 21 nt, synthetic construct
  source 1..21: mol_type = other RNA
ttcccatgtccagtctgatta

SEQ ID NO: 389 - RNA, 21 nt, synthetic construct
  source 1..21: mol_type = other RNA
ccagtctgattgctggaaaaa

SEQ ID NO: 390 - RNA, 21 nt, synthetic construct
  source 1..21: mol_type = other RNA
tgattgctggaaaagggaaaa

SEQ ID NO: 391 - RNA, 21 nt, synthetic construct
  source 1..21: mol_type = other RNA
ctggaaaagggaaagccatta

SEQ ID NO: 392 - RNA, 21 nt, synthetic construct
  source 1..21: mol_type = other RNA
aagggaaagccattttgtcta

SEQ ID NO: 393 - RNA, 21 nt, synthetic construct
  source 1..21: mol_type = other RNA
agccattttgtctctctatga

SEQ ID NO: 394 - RNA, 21 nt, synthetic construct
  source 1..21: mol_type = other RNA
ttttgtctctctatgtggtca

SEQ ID NO: 395 - RNA, 21 nt, synthetic construct
  source 1..21: mol_type = other RNA
tctctctatgtggtcgactta

SEQ ID NO: 396 - RNA, 21 nt, synthetic construct
  source 1..21: mol_type = other RNA
tgtggtcgacttcaccttcta

SEQ ID NO: 397 - RNA, 21 nt, synthetic construct
  source 1..21: mol_type = other RNA
cgacttcaccttctgtgttga

SEQ ID NO: 398 - RNA, 21 nt, synthetic construct
  source 1..21: mol_type = other RNA
accttctgtgttgctgtggta

SEQ ID NO: 399 - RNA, 21 nt, synthetic construct
  source 1..21: mol_type = other RNA
tgttgctgtggtctctgtcta

SEQ ID NO: 400 - RNA, 21 nt, synthetic construct
  source 1..21: mol_type = other RNA
tgtggtctctgtctcttacaa

SEQ ID NO: 401 - RNA, 21 nt, synthetic construct
  source 1..21: mol_type = other RNA
tctctgtctcttacatcatga

SEQ ID NO: 402 - RNA, 21 nt, synthetic construct
  source 1..21: mol_type = other RNA
tcttacatcatgattgctcaa

SEQ ID NO: 403 - RNA, 21 nt, synthetic construct
  source 1..21: mol_type = other RNA
atcatgattgctcagacccta

SEQ ID NO: 404 - RNA, 21 nt, synthetic construct
  source 1..21: mol_type = other RNA
agaccctgcggaagaacgcta

SEQ ID NO: 405 - RNA, 21 nt, synthetic construct
  source 1..21: mol_type = other RNA
tgcggaagaacgctcaagtca

SEQ ID NO: 406 - RNA, 21 nt, synthetic construct
  source 1..21: mol_type = other RNA
aagaacgctcaagtcagaaaa

SEQ ID NO: 407 - RNA, 21 nt, synthetic construct
  source 1..21: mol_type = other RNA
cgctcaagtcagaaagtgcca

SEQ ID NO: 408 - RNA, 21 nt, synthetic construct
  source 1..21: mol_type = other RNA
gtaatcacagtcgatgcttca

SEQ ID NO: 409 - RNA, 21 nt, synthetic construct
  source 1..21: mol_type = other RNA
agtcgatgcttccagaccaca

SEQ ID NO: 410 - RNA, 21 nt, synthetic construct
  source 1..21: mol_type = other RNA
gcttccagaccacagccttta

SEQ ID NO: 411 - RNA, 21 nt, synthetic construct
  source 1..21: mol_type = other RNA
cagaccacagcctttcatgga

SEQ ID NO: 412 - RNA, 21 nt, synthetic construct
  source 1..21: mol_type = other RNA
gtggagatcccatccagtgta

SEQ ID NO: 413 - RNA, 21 nt, synthetic construct
  source 1..21: mol_type = other RNA
gatcccatccagtgtgccata

SEQ ID NO: 414 - RNA, 21 nt, synthetic construct
  source 1..21: mol_type = other RNA
tgccggctctgtataggaaca

SEQ ID NO: 415 - RNA, 21 nt, synthetic construct
  source 1..21: mol_type = other RNA
gctctgtataggaaccagaaa

SEQ ID NO: 416 - RNA, 21 nt, synthetic construct
  source 1..21: mol_type = other RNA
gtataggaaccagaattacaa

SEQ ID NO: 417 - RNA, 21 nt, synthetic construct
  source 1..21: mol_type = other RNA
gaaccagaattacaacaaaca

SEQ ID NO: 418 - RNA, 21 nt, synthetic construct
  source 1..21: mol_type = other RNA
aattacaacaaactgcagcaa

SEQ ID NO: 419 - RNA, 21 nt, synthetic construct
  source 1..21: mol_type = other RNA
aacaaactgcagcacgttcaa

SEQ ID NO: 420 - RNA, 21 nt, synthetic construct
  source 1..21: mol_type = other RNA
ctgcagcacgttcagacccga

SEQ ID NO: 421 - RNA, 21 nt, synthetic construct
  source 1..21: mol_type = other RNA
cacgttcagacccgtggataa

SEQ ID NO: 422 - RNA, 21 nt, synthetic construct
  source 1..21: mol_type = other RNA
cagacccgtggatataccaaa

SEQ ID NO: 423 - RNA, 21 nt, synthetic construct
  source 1..21: mol_type = other RNA
ccgtggatataccaagagtca

SEQ ID NO: 424 - RNA, 21 nt, synthetic construct
  source 1..21: mol_type = other RNA
gatataccaagagtcccaaca

SEQ ID NO: 425 - RNA, 21 nt, synthetic construct
  source 1..21: mol_type = other RNA
accaagagtcccaaccaacta

SEQ ID NO: 426 - RNA, 21 nt, synthetic construct
  source 1..21: mol_type = other RNA
agtcccaaccaactggtcaca

SEQ ID NO: 427 - RNA, 21 nt, synthetic construct
  source 1..21: mol_type = other RNA
gcaagccgactccagctcgta

SEQ ID NO: 428 - RNA, 21 nt, synthetic construct
  source 1..21: mol_type = other RNA
cgactccagctcgtatcagca

SEQ ID NO: 429 - RNA, 21 nt, synthetic construct
  source 1..21: mol_type = other RNA
ctcgtatcagccatcaaccta

SEQ ID NO: 430 - RNA, 21 nt, synthetic construct
  source 1..21: mol_type = other RNA
agccatcaacctctccactga

SEQ ID NO: 431 - RNA, 21 nt, synthetic construct
  source 1..21: mol_type = other RNA
tcaacctctccactgccaaga

SEQ ID NO: 432 - RNA, 21 nt, synthetic construct
  source 1..21: mol_type = other RNA
ctctccactgccaaggattca

SEQ ID NO: 433 - RNA, 21 nt, synthetic construct
  source 1..21: mol_type = other RNA
tgccaaggattccaaagccga

SEQ ID NO: 434 - RNA, 21 nt, synthetic construct
  source 1..21: mol_type = other RNA
gattccaaagccgtggtcaca

SEQ ID NO: 435 - RNA, 21 nt, synthetic construct
  source 1..21: mol_type = other RNA
aaagccgtggtcacctgtgta

SEQ ID NO: 436 - RNA, 21 nt, synthetic construct
  source 1..21: mol_type = other RNA
tggtcacctgtgtgatcatta

SEQ ID NO: 437 - RNA, 21 nt, synthetic construct
  source 1..21: mol_type = other RNA
acctgtgtgatcattgtgcta

SEQ ID NO: 438 - RNA, 21 nt, synthetic construct
  source 1..21: mol_type = other RNA
gtgatcattgtgctgtcagta

SEQ ID NO: 439 - RNA, 21 nt, synthetic construct
  source 1..21: mol_type = other RNA
gtgctgtcagtcctggtgtga

SEQ ID NO: 440 - RNA, 21 nt, synthetic construct
  source 1..21: mol_type = other RNA
tcagtcctggtgtgctgtcta

SEQ ID NO: 441 - RNA, 21 nt, synthetic construct
  source 1..21: mol_type = other RNA
ctggtgtgctgtcttccacta

SEQ ID NO: 442 - RNA, 21 nt, synthetic construct
  source 1..21: mol_type = other RNA
tttccttggtacaggtggtta

SEQ ID NO: 443 - RNA, 21 nt, synthetic construct
  source 1..21: mol_type = other RNA
ttggtacaggtggttctctca

SEQ ID NO: 444 - RNA, 21 nt, synthetic construct
  source 1..21: mol_type = other RNA
gtggttctctccagcaatgga

SEQ ID NO: 445 - RNA, 21 nt, synthetic construct
  source 1..21: mol_type = other RNA
tctccagcaatgggagcttca

SEQ ID NO: 446 - RNA, 21 nt, synthetic construct
  source 1..21: mol_type = other RNA
aatgggagcttcattctttaa

SEQ ID NO: 447 - RNA, 21 nt, synthetic construct
  source 1..21: mol_type = other RNA
ttcattctttaccagtttgaa

SEQ ID NO: 448 - RNA, 21 nt, synthetic construct
  source 1..21: mol_type = other RNA
ctttaccagtttgaattgtta

SEQ ID NO: 449 - RNA, 21 nt, synthetic construct
  source 1..21: mol_type = other RNA
cagtttgaattgtttggatta

SEQ ID NO: 450 - RNA, 21 nt, synthetic construct
  source 1..21: mol_type = other RNA
aattgtttggatttactctta

SEQ ID NO: 451 - RNA, 21 nt, synthetic construct
  source 1..21: mol_type = other RNA
tcttatatttttcaagtcaga

SEQ ID NO: 452 - RNA, 21 nt, synthetic construct
  source 1..21: mol_type = other RNA
tttcaagtcaggattaaacca

SEQ ID NO: 453 - RNA, 21 nt, synthetic construct
  source 1..21: mol_type = other RNA
gtcaggattaaacccttttaa

SEQ ID NO: 454 - RNA, 21 nt, synthetic construct
  source 1..21: mol_type = other RNA
aacccttttatatattctcga

SEQ ID NO: 455 - RNA, 21 nt, synthetic construct
  source 1..21: mol_type = other RNA
ttttatatattctcggaacaa

SEQ ID NO: 456 - RNA, 21 nt, synthetic construct
  source 1..21: mol_type = other RNA
tatattctcggaacagtgcaa

SEQ ID NO: 457 - RNA, 21 nt, synthetic construct
  source 1..21: mol_type = other RNA
tctcggaacagtgcagggcta

SEQ ID NO: 458 - RNA, 21 nt, synthetic construct
  source 1..21: mol_type = other RNA
gcagggctgagaaggaaagta

SEQ ID NO: 459 - RNA, 21 nt, synthetic construct
  source 1..21: mol_type = other RNA
gctgagaaggaaagtgctcta

SEQ ID NO: 460 - RNA, 21 nt, synthetic construct
  source 1..21: mol_type = other RNA
gaaggaaagtgctctggtgca

SEQ ID NO: 461 - RNA, 21 nt, synthetic construct
  source 1..21: mol_type = other RNA
ctggtgcctccaatacataga

SEQ ID NO: 462 - RNA, 21 nt, synthetic construct
  source 1..21: mol_type = other RNA
cctccaatacataggcctgga

SEQ ID NO: 463 - RNA, 21 nt, synthetic construct
  source 1..21: mol_type = other RNA
aatacataggcctgggtttta

SEQ ID NO: 464 - RNA, 21 nt, synthetic construct
  source 1..21: mol_type = other RNA
tttctgctgcaaacaaaagaa

SEQ ID NO: 465 - RNA, 21 nt, synthetic construct
  source 1..21: mol_type = other RNA
tgcaaacaaaagactcgacta

SEQ ID NO: 466 - RNA, 21 nt, synthetic construct
  source 1..21: mol_type = other RNA
acaaaagactcgacttcgaga

SEQ ID NO: 467 - RNA, 21 nt, synthetic construct
  source 1..21: mol_type = other RNA
agactcgacttcgagccatga

SEQ ID NO: 468 - RNA, 21 nt, synthetic construct
  source 1..21: mol_type = other RNA
gacttcgagccatgggaaaaa

SEQ ID NO: 469 - RNA, 21 nt, synthetic construct
  source 1..21: mol_type = other RNA
cgagccatgggaaaagggaaa

SEQ ID NO: 470 - RNA, 21 nt, synthetic construct
  source 1..21: mol_type = other RNA
catgggaaaagggaacctcga

SEQ ID NO: 471 - RNA, 21 nt, synthetic construct
  source 1..21: mol_type = other RNA
aaagggaacctcgaagtcaaa

SEQ ID NO: 472 - RNA, 21 nt, synthetic construct
  source 1..21: mol_type = other RNA
aacctcgaagtcaacagaaaa

SEQ ID NO: 473 - RNA, 21 nt, synthetic construct
  source 1..21: mol_type = other RNA
gaagtcaacagaaacaaatca

SEQ ID NO: 474 - RNA, 21 nt, synthetic construct
  source 1..21: mol_type = other RNA
caacagaaacaaatcctccca

SEQ ID NO: 475 - RNA, 21 nt, synthetic construct
  source 1..21: mol_type = other RNA
aaacaaatcctcccatcatga

SEQ ID NO: 476 - RNA, 21 nt, synthetic construct
  source 1..21: mol_type = other RNA
atcctcccatcatgaaacaaa

SEQ ID NO: 477 - RNA, 21 nt, synthetic construct
  source 1..21: mol_type = other RNA
cccatcatgaaacaaactcta

SEQ ID NO: 478 - RNA, 21 nt, synthetic construct
  source 1..21: mol_type = other RNA
atgaaacaaactctgcctaca

SEQ ID NO: 479 - RNA, 21 nt, synthetic construct
  source 1..21: mol_type = other RNA
actctgcctacatgttatcta

SEQ ID NO: 480 - RNA, 21 nt, synthetic construct
  source 1..21: mol_type = other RNA
gcctacatgttatctccaaaa

SEQ ID NO: 481 - RNA, 21 nt, synthetic construct
  source 1..21: mol_type = other RNA
catgttatctccaaagccaca

SEQ ID NO: 482 - RNA, 21 nt, synthetic construct
  source 1..21: mol_type = other RNA
tccaaagccacagaagaaata

SEQ ID NO: 483 - RNA, 21 nt, synthetic construct
  source 1..21: mol_type = other RNA
agccacagaagaaatttgtga

SEQ ID NO: 484 - RNA, 21 nt, synthetic construct
  source 1..21: mol_type = other RNA
cagaagaaatttgtggaccaa

SEQ ID NO: 485 - RNA, 21 nt, synthetic construct
  source 1..21: mol_type = other RNA
gaaatttgtggaccaggctta

SEQ ID NO: 486 - RNA, 21 nt, synthetic construct
  source 1..21: mol_type = other RNA
accaggcttgtggcccaagta

SEQ ID NO: 487 - RNA, 21 nt, synthetic construct
  source 1..21: mol_type = other RNA
tgtggcccaagtcattcaaaa

SEQ ID NO: 488 - RNA, 21 nt, synthetic construct
  source 1..21: mol_type = other RNA
cccaagtcattcaaaagaaaa

SEQ ID NO: 489 - RNA, 21 nt, synthetic construct
  source 1..21: mol_type = other RNA
cattcaaaagaaagtatggta

SEQ ID NO: 490 - RNA, 21 nt, synthetic construct
  source 1..21: mol_type = other RNA
aaaagaaagtatggtgagtca

SEQ ID NO: 491 - RNA, 21 nt, synthetic construct
  source 1..21: mol_type = other RNA
agtatggtgagtcccaagata

SEQ ID NO: 492 - RNA, 21 nt, synthetic construct
  source 1..21: mol_type = other RNA
tgagtcccaagatctctgcta

SEQ ID NO: 493 - RNA, 21 nt, synthetic construct
  source 1..21: mol_type = other RNA
cccaagatctctgctggacaa

SEQ ID NO: 494 - RNA, 21 nt, synthetic construct
  source 1..21: mol_type = other RNA
gatctctgctggacatcaaca

SEQ ID NO: 495 - RNA, 21 nt, synthetic construct
  source 1..21: mol_type = other RNA
ctgctggacatcaacactgta

SEQ ID NO: 496 - RNA, 21 nt, synthetic construct
  source 1..21: mol_type = other RNA
gacatcaacactgtggtcaga

SEQ ID NO: 497 - RNA, 21 nt, synthetic construct
  source 1..21: mol_type = other RNA
acactgtggtcagagcagcta

SEQ ID NO: 498 - RNA, 21 nt, synthetic construct
  source 1..21: mol_type = other RNA
caacactcggattgaacctta

SEQ ID NO: 499 - RNA, 21 nt, synthetic construct
  source 1..21: mol_type = other RNA
ctcggattgaaccttactaca

SEQ ID NO: 500 - RNA, 21 nt, synthetic construct
  source 1..21: mol_type = other RNA
ttgaaccttactacagcatca

SEQ ID NO: 501 - RNA, 21 nt, synthetic construct
  source 1..21: mol_type = other RNA
ccttactacagcatctataaa

SEQ ID NO: 502 - RNA, 21 nt, synthetic construct
  source 1..21: mol_type = other RNA
ctacagcatctataacagcaa

SEQ ID NO: 503 - RNA, 21 nt, synthetic construct
  source 1..21: mol_type = other RNA
catctataacagcagccctta

SEQ ID NO: 504 - RNA, 21 nt, synthetic construct
  source 1..21: mol_type = other RNA
gagagcagcccatgtaactta

SEQ ID NO: 505 - RNA, 21 nt, synthetic construct
  source 1..21: mol_type = other RNA
cagcccatgtaacttacagca

SEQ ID NO: 506 - RNA, 21 nt, synthetic construct
  source 1..21: mol_type = other RNA
atgtaacttacagccagtaaa

SEQ ID NO: 507 - RNA, 21 nt, synthetic construct
  source 1..21: mol_type = other RNA
cttacagccagtaaactctta

SEQ ID NO: 508 - RNA, 21 nt, synthetic construct
  source 1..21: mol_type = other RNA
ccagtaaactcttttggatta

SEQ ID NO: 509 - RNA, 21 nt, synthetic construct
  source 1..21: mol_type = other RNA
actcttttggatttgccaata

SEQ ID NO: 510 - RNA, 21 nt, synthetic construct
  source 1..21: mol_type = other RNA
gatttgccaattcatatatta

SEQ ID NO: 511 - RNA, 21 nt, synthetic construct
  source 1..21: mol_type = other RNA
attcatatattgccatgcata

SEQ ID NO: 512 - RNA, 21 nt, synthetic construct
  source 1..21: mol_type = other RNA
atattgccatgcattatcaca

SEQ ID NO: 513 - RNA, 21 nt, synthetic construct
  source 1..21: mol_type = other RNA
atgcattatcacaccactaaa

SEQ ID NO: 514 - RNA, 21 nt, synthetic construct
  source 1..21: mol_type = other RNA
tatcacaccactaatgactta

SEQ ID NO: 515 - RNA, 21 nt, synthetic construct
  source 1..21: mol_type = other RNA
caccactaatgacttagtgca

SEQ ID NO: 516 - RNA, 21 nt, synthetic construct
  source 1..21: mol_type = other RNA
aatgacttagtgcaggaataa

SEQ ID NO: 517 - RNA, 21 nt, synthetic construct
  source 1..21: mol_type = other RNA
ttagtgcaggaatatgacaga

SEQ ID NO: 518 - RNA, 21 nt, synthetic construct
  source 1..21: mol_type = other RNA
gcaggaatatgacagcactta

SEQ ID NO: 519 - RNA, 21 nt, synthetic construct
  source 1..21: mol_type = other RNA
tatgacagcacttcagccaaa

SEQ ID NO: 520 - RNA, 21 nt, synthetic construct
  source 1..21: mol_type = other RNA
cacttcagccaagcagattca

SEQ ID NO: 521 - RNA, 21 nt, synthetic construct
  source 1..21: mol_type = other RNA
cagccaagcagattccagtca

SEQ ID NO: 522 - RNA, 21 nt, synthetic construct
  source 1..21: mol_type = other RNA
ctccgtttaaagtcatggaga

SEQ ID NO: 523 - RNA, 21 nt, synthetic construct
  source 1..21: mol_type = other RNA
aaagtcatggaggctatagga

SEQ ID NO: 524 - RNA, 21 nt, synthetic construct
  source 1..21: mol_type = other RNA
ggaggctataggatcttatga

SEQ ID NO: 525 - RNA, 21 nt, synthetic construct
  source 1..21: mol_type = other RNA
ctataggatcttatgtaaaca

SEQ ID NO: 526 - RNA, 21 nt, synthetic construct
  source 1..21: mol_type = other RNA
ggatcttatgtaaacagttta

SEQ ID NO: 527 - RNA, 21 nt, synthetic construct
  source 1..21: mol_type = other RNA
aaacagtttttgtttctgata

SEQ ID NO: 528 - RNA, 21 nt, synthetic construct
  source 1..21: mol_type = other RNA
gtttttgtttctgatagtaaa

SEQ ID NO: 529 - RNA, 21 nt, synthetic construct
  source 1..21: mol_type = other RNA
tgtttctgatagtaatggaca

SEQ ID NO: 530 - RNA, 21 nt, synthetic construct
  source 1..21: mol_type = other RNA
ctgatagtaatggactttata

SEQ ID NO: 531 - RNA, 21 nt, synthetic construct
  source 1..21: mol_type = other RNA
aatggactttattctaactta

SEQ ID NO: 532 - RNA, 21 nt, synthetic construct
  source 1..21: mol_type = other RNA
tttattctaacttgagatcaa

SEQ ID NO: 533 - RNA, 21 nt, synthetic construct
  source 1..21: mol_type = other RNA
tctaacttgagatcagtggca

SEQ ID NO: 534 - RNA, 21 nt, synthetic construct
  source 1..21: mol_type = other RNA
gagatcagtggcggatcaaaa

SEQ ID NO: 535 - RNA, 21 nt, synthetic construct
  source 1..21: mol_type = other RNA
cagtggcggatcaaaacctaa

SEQ ID NO: 536 - RNA, 21 nt, synthetic construct
  source 1..21: mol_type = other RNA
ggatcaaaacctacaagatta

SEQ ID NO: 537 - RNA, 21 nt, synthetic construct
  source 1..21: mol_type = other RNA
aaaacctacaagattcaacta

SEQ ID NO: 538 - RNA, 21 nt, synthetic construct
  source 1..21: mol_type = other RNA
ctacaagattcaactgaaaaa

SEQ ID NO: 539 - RNA, 21 nt, synthetic construct
  source 1..21: mol_type = other RNA
agattcaactgaaaagttgga

SEQ ID NO: 540 - RNA, 21 nt, synthetic construct
  source 1..21: mol_type = other RNA
aactgaaaagttggcagttaa

SEQ ID NO: 541 - RNA, 21 nt, synthetic construct
  source 1..21: mol_type = other RNA
aaagttggcagttatggttta

SEQ ID NO: 542 - RNA, 21 nt, synthetic construct
  source 1..21: mol_type = other RNA
tggcagttatggttttcttta

SEQ ID NO: 543 - RNA, 21 nt, synthetic construct
  source 1..21: mol_type = other RNA
gttatggttttctttcatcta

SEQ ID NO: 544 - RNA, 21 nt, synthetic construct
  source 1..21: mol_type = other RNA
ttctttcatctgatgtgtcaa

SEQ ID NO: 545 - RNA, 21 nt, synthetic construct
  source 1..21: mol_type = other RNA
catctgatgtgtcagtatcta

SEQ ID NO: 546 - RNA, 21 nt, synthetic construct
  source 1..21: mol_type = other RNA
atgtgtcagtatctgttgata

SEQ ID NO: 547 - RNA, 21 nt, synthetic construct
  source 1..21: mol_type = other RNA
cagtatctgttgatttgctta

SEQ ID NO: 548 - RNA, 21 nt, synthetic construct
  source 1..21: mol_type = other RNA
gttgatttgctttgtagttta

SEQ ID NO: 549 - RNA, 21 nt, synthetic construct
  source 1..21: mol_type = other RNA
gctttgtagtttgttgacata

SEQ ID NO: 550 - RNA, 21 nt, synthetic construct
  source 1..21: mol_type = other RNA
gtagtttgttgacatcttaaa

SEQ ID NO: 551 - RNA, 21 nt, synthetic construct
  source 1..21: mol_type = other RNA
ttgttgacatcttaagattta

SEQ ID NO: 552 - RNA, 21 nt, synthetic construct
  source 1..21: mol_type = other RNA
gacatcttaagatttgatgta

SEQ ID NO: 553 - RNA, 21 nt, synthetic construct
  source 1..21: mol_type = other RNA
ttaagatttgatgtgaaagta

SEQ ID NO: 554 - RNA, 21 nt, synthetic construct
  source 1..21: mol_type = other RNA
tttgatgtgaaagttttagaa

SEQ ID NO: 555 - RNA, 23 nt, synthetic construct
  source 1..23: mol_type = other RNA
aactagaggcatcatcgccatcg

SEQ ID NO: 556 - RNA, 23 nt, synthetic construct
  source 1..23: mol_type = other RNA
aatgcaggactagaggcatcatc

SEQ ID NO: 557 - RNA, 23 nt, synthetic construct
  source 1..23: mol_type = other RNA
aggatgatgcaggactagaggca

SEQ ID NO: 558 - RNA, 23 nt, synthetic construct
  source 1..23: mol_type = other RNA
acgctctggatgatgcaggacta

SEQ ID NO: 559 - RNA, 23 nt, synthetic construct
  source 1..23: mol_type = other RNA
atcctccatctcgcagtccggac

SEQ ID NO: 560 - RNA, 23 nt, synthetic construct
  source 1..23: mol_type = other RNA
aacagataagcctgccgggtggc

SEQ ID NO: 561 - RNA, 23 nt, synthetic construct
  source 1..23: mol_type = other RNA
accaagacagataagcctgccgg

SEQ ID NO: 562 - RNA, 23 nt, synthetic construct
  source 1..23: mol_type = other RNA
aaaaagaggcccaagacagataa

SEQ ID NO: 563 - RNA, 23 nt, synthetic construct
  source 1..23: mol_type = other RNA
agtgacaaaagaggcccaagaca

SEQ ID NO: 564 - RNA, 23 nt, synthetic construct
  source 1..23: mol_type = other RNA
aaatatgtgacaaaagaggccca

SEQ ID NO: 565 - RNA, 23 nt, synthetic construct
  source 1..23: mol_type = other RNA
aatgagcaatatgtgacaaaaga

SEQ ID NO: 566 - RNA, 23 nt, synthetic construct
  source 1..23: mol_type = other RNA
atcacagatgagcaatatgtgac

SEQ ID NO: 567 - RNA, 23 nt, synthetic construct
  source 1..23: mol_type = other RNA
atcagctcacagatgagcaatat

SEQ ID NO: 568 - RNA, 23 nt, synthetic construct
  source 1..23: mol_type = other RNA
aagggcctcagctcacagatgag

SEQ ID NO: 569 - RNA, 23 nt, synthetic construct
  source 1..23: mol_type = other RNA
aatactcagtgagtcagggcctc

SEQ ID NO: 570 - RNA, 23 nt, synthetic construct
  source 1..23: mol_type = other RNA
acaaaaatactcagtgagtcagg

SEQ ID NO: 571 - RNA, 23 nt, synthetic construct
  source 1..23: mol_type = other RNA
aaatgtctccttcttctgctccc

SEQ ID NO: 572 - RNA, 23 nt, synthetic construct
  source 1..23: mol_type = other RNA
aagagaaatgtctccttcttctg

SEQ ID NO: 573 - RNA, 23 nt, synthetic construct
  source 1..23: mol_type = other RNA
atttcggagagaaatgtctcctt

SEQ ID NO: 574 - RNA, 23 nt, synthetic construct
  source 1..23: mol_type = other RNA
aagttcattttcggagagaaatg

SEQ ID NO: 575 - RNA, 23 nt, synthetic construct
  source 1..23: mol_type = other RNA
atgttgagttcattttcggagag

SEQ ID NO: 576 - RNA, 23 nt, synthetic construct
  source 1..23: mol_type = other RNA
atggcctgttgagttcattttcg

SEQ ID NO: 577 - RNA, 23 nt, synthetic construct
  source 1..23: mol_type = other RNA
agaaggtggcctgttgagttcat

SEQ ID NO: 578 - RNA, 23 nt, synthetic construct
  source 1..23: mol_type = other RNA
agcatcctgaaggtggcctgttg

SEQ ID NO: 579 - RNA, 23 nt, synthetic construct
  source 1..23: mol_type = other RNA
aaggcacatggagcgaggtggca

SEQ ID NO: 580 - RNA, 23 nt, synthetic construct
  source 1..23: mol_type = other RNA
agagtgaggcacatggagcgagg

SEQ ID NO: 581 - RNA, 23 nt, synthetic construct
  source 1..23: mol_type = other RNA
attcctgtgagtgaggcacatgg

SEQ ID NO: 582 - RNA, 23 nt, synthetic construct
  source 1..23: mol_type = other RNA
atttccttcctgtgagtgaggca

SEQ ID NO: 583 - RNA, 23 nt, synthetic construct
  source 1..23: mol_type = other RNA
aaggtgctgtttccttcctgtga

SEQ ID NO: 584 - RNA, 23 nt, synthetic construct
  source 1..23: mol_type = other RNA
agagagaggtgctgtttccttcc

SEQ ID NO: 585 - RNA, 23 nt, synthetic construct
  source 1..23: mol_type = other RNA
actgaagaccctcctggagagag

SEQ ID NO: 586 - RNA, 23 nt, synthetic construct
  source 1..23: mol_type = other RNA
aagatcctgaagaccctcctgga

SEQ ID NO: 587 - RNA, 23 nt, synthetic construct
  source 1..23: mol_type = other RNA
atggatgagatcctgaagaccct

SEQ ID NO: 588 - RNA, 23 nt, synthetic construct
  source 1..23: mol_type = other RNA
actgtgtggatgagatcctgaag

SEQ ID NO: 589 - RNA, 23 nt, synthetic construct
  source 1..23: mol_type = other RNA
acaaggtggctgtgtggatgaga

SEQ ID NO: 590 - RNA, 23 nt, synthetic construct
  source 1..23: mol_type = other RNA
agtcaccaaggtggctgtgtgga

SEQ ID NO: 591 - RNA, 23 nt, synthetic construct
  source 1..23: mol_type = other RNA
atacaggtcaccaaggtggctgt

SEQ ID NO: 592 - RNA, 23 nt, synthetic construct
  source 1..23: mol_type = other RNA
aaaaagtacaggtcaccaaggtg

SEQ ID NO: 593 - RNA, 23 nt, synthetic construct
  source 1..23: mol_type = other RNA
aagtagaaaagtacaggtcacca

SEQ ID NO: 594 - RNA, 23 nt, synthetic construct
  source 1..23: mol_type = other RNA
aatgaccgccagtagaaaagtac

SEQ ID NO: 595 - RNA, 23 nt, synthetic construct
  source 1..23: mol_type = other RNA
aagaagatgaccgccagtagaaa

SEQ ID NO: 596 - RNA, 23 nt, synthetic construct
  source 1..23: mol_type = other RNA
aaacccaggcagaagatgaccgc

SEQ ID NO: 597 - RNA, 23 nt, synthetic construct
  source 1..23: mol_type = other RNA
accataggaacccaggcagaaga

SEQ ID NO: 598 - RNA, 23 nt, synthetic construct
  source 1..23: mol_type = other RNA
aagttgccataggaacccaggca

SEQ ID NO: 599 - RNA, 23 nt, synthetic construct
  source 1..23: mol_type = other RNA
aaatgaagttgccataggaaccc

SEQ ID NO: 600 - RNA, 23 nt, synthetic construct
  source 1..23: mol_type = other RNA
aaagacaatgaagttgccatagg

SEQ ID NO: 601 - RNA, 23 nt, synthetic construct
  source 1..23: mol_type = other RNA
aacaagaagacaatgaagttgcc

SEQ ID NO: 602 - RNA, 23 nt, synthetic construct
  source 1..23: mol_type = other RNA
agaaggacaagaagacaatgaag

SEQ ID NO: 603 - RNA, 23 nt, synthetic construct
  source 1..23: mol_type = other RNA
atcgaagaaggacaagaagacaa

SEQ ID NO: 604 - RNA, 23 nt, synthetic construct
  source 1..23: mol_type = other RNA
actggatcgaagaaggacaagaa

SEQ ID NO: 605 - RNA, 23 nt, synthetic construct
  source 1..23: mol_type = other RNA
agaaggctggatcgaagaaggac

SEQ ID NO: 606 - RNA, 23 nt, synthetic construct
  source 1..23: mol_type = other RNA
aaatttcctgaaggctggatcga

SEQ ID NO: 607 - RNA, 23 nt, synthetic construct
  source 1..23: mol_type = other RNA
attctgaatttcctgaaggctgg

SEQ ID NO: 608 - RNA, 23 nt, synthetic construct
  source 1..23: mol_type = other RNA
agttggttctgaatttcctgaag

SEQ ID NO: 609 - RNA, 23 nt, synthetic construct
  source 1..23: mol_type = other RNA
aaatcaaagttggttctgaattt

SEQ ID NO: 610 - RNA, 23 nt, synthetic construct
  source 1..23: mol_type = other RNA
atcatgaaatcaaagttggttct

SEQ ID NO: 611 - RNA, 23 nt, synthetic construct
  source 1..23: mol_type = other RNA
attcaggatcatgaaatcaaagt

SEQ ID NO: 612 - RNA, 23 nt, synthetic construct
  source 1..23: mol_type = other RNA
agacaggttcaggatcatgaaat

SEQ ID NO: 613 - RNA, 23 nt, synthetic construct
  source 1..23: mol_type = other RNA
aagaaggacaggttcaggatcat

SEQ ID NO: 614 - RNA, 23 nt, synthetic construct
  source 1..23: mol_type = other RNA
aggtcacagaaggacaggttcag

SEQ ID NO: 615 - RNA, 23 nt, synthetic construct
  source 1..23: mol_type = other RNA
agaagaggtcacagaaggacagg

SEQ ID NO: 616 - RNA, 23 nt, synthetic construct
  source 1..23: mol_type = other RNA
acaaatgaagaggtcacagaagg

SEQ ID NO: 617 - RNA, 23 nt, synthetic construct
  source 1..23: mol_type = other RNA
aactccacaaatgaagaggtcac

SEQ ID NO: 618 - RNA, 23 nt, synthetic construct
  source 1..23: mol_type = other RNA
actgtcactccacaaatgaagag

SEQ ID NO: 619 - RNA, 23 nt, synthetic construct
  source 1..23: mol_type = other RNA
aataacacaaaggtgaacatggg

SEQ ID NO: 620 - RNA, 23 nt, synthetic construct
  source 1..23: mol_type = other RNA
agaagaataacacaaaggtgaac

SEQ ID NO: 621 - RNA, 23 nt, synthetic construct
  source 1..23: mol_type = other RNA
agagctgaagaataacacaaagg

SEQ ID NO: 622 - RNA, 23 nt, synthetic construct
  source 1..23: mol_type = other RNA
atggctgagctgaagaataacac

SEQ ID NO: 623 - RNA, 23 nt, synthetic construct
  source 1..23: mol_type = other RNA
aggatactactggctgagctgaa

SEQ ID NO: 624 - RNA, 23 nt, synthetic construct
  source 1..23: mol_type = other RNA
aatccgggatactactggctgag

SEQ ID NO: 625 - RNA, 23 nt, synthetic construct
  source 1..23: mol_type = other RNA
aagaaagcatccgggatactact

SEQ ID NO: 626 - RNA, 23 nt, synthetic construct
  source 1..23: mol_type = other RNA
agaagcagaaagcatccgggata

SEQ ID NO: 627 - RNA, 23 nt, synthetic construct
  source 1..23: mol_type = other RNA
aaaagtgaagcagaaagcatccg

SEQ ID NO: 628 - RNA, 23 nt, synthetic construct
  source 1..23: mol_type = other RNA
agatggaaagtgaagcagaaagc

SEQ ID NO: 629 - RNA, 23 nt, synthetic construct
  source 1..23: mol_type = other RNA
aaactggtgagatggaaagtgaa

SEQ ID NO: 630 - RNA, 23 nt, synthetic construct
  source 1..23: mol_type = other RNA
aagcctgaactggtgagatggaa

SEQ ID NO: 631 - RNA, 23 nt, synthetic construct
  source 1..23: mol_type = other RNA
agatgaagcctgaactggtgaga

SEQ ID NO: 632 - RNA, 23 nt, synthetic construct
  source 1..23: mol_type = other RNA
aatgatgatgaagcctgaactgg

SEQ ID NO: 633 - RNA, 23 nt, synthetic construct
  source 1..23: mol_type = other RNA
agagacatgatgatgaagcctga

SEQ ID NO: 634 - RNA, 23 nt, synthetic construct
  source 1..23: mol_type = other RNA
acttcagagacatgatgatgaag

SEQ ID NO: 635 - RNA, 23 nt, synthetic construct
  source 1..23: mol_type = other RNA
aactgtcttcagagacatgatga

SEQ ID NO: 636 - RNA, 23 nt, synthetic construct
  source 1..23: mol_type = other RNA
aactgccactgtcttcagagaca

SEQ ID NO: 637 - RNA, 23 nt, synthetic construct
  source 1..23: mol_type = other RNA
agcagggcgatcactgccactgt

SEQ ID NO: 638 - RNA, 23 nt, synthetic construct
  source 1..23: mol_type = other RNA
aaacaccatccggagccggtgca

SEQ ID NO: 639 - RNA, 23 nt, synthetic construct
  source 1..23: mol_type = other RNA
aaggccgtgcgattaggctgttt

SEQ ID NO: 640 - RNA, 23 nt, synthetic construct
  source 1..23: mol_type = other RNA
aaaaggaggccgtgcgattaggc

SEQ ID NO: 641 - RNA, 23 nt, synthetic construct
  source 1..23: mol_type = other RNA
acagggaaaggaggccgtgcgat

SEQ ID NO: 642 - RNA, 23 nt, synthetic construct
  source 1..23: mol_type = other RNA
atacggtgcagggaaaggaggcc

SEQ ID NO: 643 - RNA, 23 nt, synthetic construct
  source 1..23: mol_type = other RNA
aaggagtacggtgcagggaaagg

SEQ ID NO: 644 - RNA, 23 nt, synthetic construct
  source 1..23: mol_type = other RNA
aagggtgaggagtacggtgcagg

SEQ ID NO: 645 - RNA, 23 nt, synthetic construct
  source 1..23: mol_type = other RNA
aagagaagcagggtgaggagtac

SEQ ID NO: 646 - RNA, 23 nt, synthetic construct
  source 1..23: mol_type = other RNA
agtggcccagagaagcagggtga

SEQ ID NO: 647 - RNA, 23 nt, synthetic construct
  source 1..23: mol_type = other RNA
aaaactggtggcccagagaagca

SEQ ID NO: 648 - RNA, 23 nt, synthetic construct
  source 1..23: mol_type = other RNA
agggtgaaactggtggcccagag

SEQ ID NO: 649 - RNA, 23 nt, synthetic construct
  source 1..23: mol_type = other RNA
atggcaagggtgaaactggtggc

SEQ ID NO: 650 - RNA, 23 nt, synthetic construct
  source 1..23: mol_type = other RNA
aagccaaggtggcaagggtgaaa

SEQ ID NO: 651 - RNA, 23 nt, synthetic construct
  source 1..23: mol_type = other RNA
attcaaggtagccaaggtggcaa

SEQ ID NO: 652 - RNA, 23 nt, synthetic construct
  source 1..23: mol_type = other RNA
atggttttcaaggtagccaaggt

SEQ ID NO: 653 - RNA, 23 nt, synthetic construct
  source 1..23: mol_type = other RNA
aacttgctggttttcaaggtagc

SEQ ID NO: 654 - RNA, 23 nt, synthetic construct
  source 1..23: mol_type = other RNA
aagaggtgggacttgctggtttt

SEQ ID NO: 655 - RNA, 23 nt, synthetic construct
  source 1..23: mol_type = other RNA
aggaagacagaggtgggacttgc

SEQ ID NO: 656 - RNA, 23 nt, synthetic construct
  source 1..23: mol_type = other RNA
agacatgggaagacagaggtggg

SEQ ID NO: 657 - RNA, 23 nt, synthetic construct
  source 1..23: mol_type = other RNA
agactggacatgggaagacagag

SEQ ID NO: 658 - RNA, 23 nt, synthetic construct
  source 1..23: mol_type = other RNA
aaatcagactggacatgggaaga

SEQ ID NO: 659 - RNA, 23 nt, synthetic construct
  source 1..23: mol_type = other RNA
attttccagcaatcagactggac

SEQ ID NO: 660 - RNA, 23 nt, synthetic construct
  source 1..23: mol_type = other RNA
atttcccttttccagcaatcaga

SEQ ID NO: 661 - RNA, 23 nt, synthetic construct
  source 1..23: mol_type = other RNA
aaatggctttcccttttccagca

SEQ ID NO: 662 - RNA, 23 nt, synthetic construct
  source 1..23: mol_type = other RNA
aagacaaaatggctttccctttt

SEQ ID NO: 663 - RNA, 23 nt, synthetic construct
  source 1..23: mol_type = other RNA
acatagagagacaaaatggcttt

SEQ ID NO: 664 - RNA, 23 nt, synthetic construct
  source 1..23: mol_type = other RNA
agaccacatagagagacaaaatg

SEQ ID NO: 665 - RNA, 23 nt, synthetic construct
  source 1..23: mol_type = other RNA
aaagtcgaccacatagagagaca

SEQ ID NO: 666 - RNA, 23 nt, synthetic construct
  source 1..23: mol_type = other RNA
aagaaggtgaagtcgaccacata

SEQ ID NO: 667 - RNA, 23 nt, synthetic construct
  source 1..23: mol_type = other RNA
acaacacagaaggtgaagtcgac

SEQ ID NO: 668 - RNA, 23 nt, synthetic construct
  source 1..23: mol_type = other RNA
aaccacagcaacacagaaggtga

SEQ ID NO: 669 - RNA, 23 nt, synthetic construct
  source 1..23: mol_type = other RNA
aagacagagaccacagcaacaca

SEQ ID NO: 670 - RNA, 23 nt, synthetic construct
  source 1..23: mol_type = other RNA
atgtaagagacagagaccacagc

SEQ ID NO: 671 - RNA, 23 nt, synthetic construct
  source 1..23: mol_type = other RNA
acatgatgtaagagacagagacc

SEQ ID NO: 672 - RNA, 23 nt, synthetic construct
  source 1..23: mol_type = other RNA
atgagcaatcatgatgtaagaga

SEQ ID NO: 673 - RNA, 23 nt, synthetic construct
  source 1..23: mol_type = other RNA
aagggtctgagcaatcatgatgt

SEQ ID NO: 674 - RNA, 23 nt, synthetic construct
  source 1..23: mol_type = other RNA
aagcgttcttccgcagggtctga

SEQ ID NO: 675 - RNA, 23 nt, synthetic construct
  source 1..23: mol_type = other RNA
agacttgagcgttcttccgcagg

SEQ ID NO: 676 - RNA, 23 nt, synthetic construct
  source 1..23: mol_type = other RNA
atttctgacttgagcgttcttcc

SEQ ID NO: 677 - RNA, 23 nt, synthetic construct
  source 1..23: mol_type = other RNA
aggcactttctgacttgagcgtt

SEQ ID NO: 678 - RNA, 23 nt, synthetic construct
  source 1..23: mol_type = other RNA
agaagcatcgactgtgattacag

SEQ ID NO: 679 - RNA, 23 nt, synthetic construct
  source 1..23: mol_type = other RNA
agtggtctggaagcatcgactgt

SEQ ID NO: 680 - RNA, 23 nt, synthetic construct
  source 1..23: mol_type = other RNA
aaaaggctgtggtctggaagcat

SEQ ID NO: 681 - RNA, 23 nt, synthetic construct
  source 1..23: mol_type = other RNA
accatgaaaggctgtggtctgga

SEQ ID NO: 682 - RNA, 23 nt, synthetic construct
  source 1..23: mol_type = other RNA
aacactggatgggatctccacct

SEQ ID NO: 683 - RNA, 23 nt, synthetic construct
  source 1..23: mol_type = other RNA
aatggcacactggatgggatctc

SEQ ID NO: 684 - RNA, 23 nt, synthetic construct
  source 1..23: mol_type = other RNA
agttcctatacagagccggcatg

SEQ ID NO: 685 - RNA, 23 nt, synthetic construct
  source 1..23: mol_type = other RNA
attctggttcctatacagagccg

SEQ ID NO: 686 - RNA, 23 nt, synthetic construct
  source 1..23: mol_type = other RNA
atgtaattctggttcctatacag

SEQ ID NO: 687 - RNA, 23 nt, synthetic construct
  source 1..23: mol_type = other RNA
agtttgttgtaattctggttcct

SEQ ID NO: 688 - RNA, 23 nt, synthetic construct
  source 1..23: mol_type = other RNA
atgctgcagtttgttgtaattct

SEQ ID NO: 689 - RNA, 23 nt, synthetic construct
  source 1..23: mol_type = other RNA
atgaacgtgctgcagtttgttgt

SEQ ID NO: 690 - RNA, 23 nt, synthetic construct
  source 1..23: mol_type = other RNA
acgggtctgaacgtgctgcagtt

SEQ ID NO: 691 - RNA, 23 nt, synthetic construct
  source 1..23: mol_type = other RNA
atatccacgggtctgaacgtgct

SEQ ID NO: 692 - RNA, 23 nt, synthetic construct
  source 1..23: mol_type = other RNA
attggtatatccacgggtctgaa

SEQ ID NO: 693 - RNA, 23 nt, synthetic construct
  source 1..23: mol_type = other RNA
agactcttggtatatccacgggt

SEQ ID NO: 694 - RNA, 23 nt, synthetic construct
  source 1..23: mol_type = other RNA
agttgggactcttggtatatcca

SEQ ID NO: 695 - RNA, 23 nt, synthetic construct
  source 1..23: mol_type = other RNA
aagttggttgggactcttggtat

SEQ ID NO: 696 - RNA, 23 nt, synthetic construct
  source 1..23: mol_type = other RNA
agtgaccagttggttgggactct

SEQ ID NO: 697 - RNA, 23 nt, synthetic construct
  source 1..23: mol_type = other RNA
aacgagctggagtcggcttgctg

SEQ ID NO: 698 - RNA, 23 nt, synthetic construct
  source 1..23: mol_type = other RNA
agctgatacgagctggagtcggc

SEQ ID NO: 699 - RNA, 23 nt, synthetic construct
  source 1..23: mol_type = other RNA
aaggttgatggctgatacgagct

SEQ ID NO: 700 - RNA, 23 nt, synthetic construct
  source 1..23: mol_type = other RNA
acagtggagaggttgatggctga

SEQ ID NO: 701 - RNA, 23 nt, synthetic construct
  source 1..23: mol_type = other RNA
acttggcagtggagaggttgatg

SEQ ID NO: 702 - RNA, 23 nt, synthetic construct
  source 1..23: mol_type = other RNA
agaatccttggcagtggagaggt

SEQ ID NO: 703 - RNA, 23 nt, synthetic construct
  source 1..23: mol_type = other RNA
acggctttggaatccttggcagt

SEQ ID NO: 704 - RNA, 23 nt, synthetic construct
  source 1..23: mol_type = other RNA
agtgaccacggctttggaatcct

SEQ ID NO: 705 - RNA, 23 nt, synthetic construct
  source 1..23: mol_type = other RNA
aacacaggtgaccacggctttgg

SEQ ID NO: 706 - RNA, 23 nt, synthetic construct
  source 1..23: mol_type = other RNA
aaatgatcacacaggtgaccacg

SEQ ID NO: 707 - RNA, 23 nt, synthetic construct
  source 1..23: mol_type = other RNA
aagcacaatgatcacacaggtga

SEQ ID NO: 708 - RNA, 23 nt, synthetic construct
  source 1..23: mol_type = other RNA
aactgacagcacaatgatcacac

SEQ ID NO: 709 - RNA, 23 nt, synthetic construct
  source 1..23: mol_type = other RNA
acacaccaggactgacagcacaa

SEQ ID NO: 710 - RNA, 23 nt, synthetic construct
  source 1..23: mol_type = other RNA
aagacagcacaccaggactgaca

SEQ ID NO: 711 - RNA, 23 nt, synthetic construct
  source 1..23: mol_type = other RNA
aagtggaagacagcacaccagga

SEQ ID NO: 712 - RNA, 23 nt, synthetic construct
  source 1..23: mol_type = other RNA
aaaccacctgtaccaaggaaatc

SEQ ID NO: 713 - RNA, 23 nt, synthetic construct
  source 1..23: mol_type = other RNA
agagagaaccacctgtaccaagg

SEQ ID NO: 714 - RNA, 23 nt, synthetic construct
  source 1..23: mol_type = other RNA
accattgctggagagaaccacct

SEQ ID NO: 715 - RNA, 23 nt, synthetic construct
  source 1..23: mol_type = other RNA
agaagctcccattgctggagaga

SEQ ID NO: 716 - RNA, 23 nt, synthetic construct
  source 1..23: mol_type = other RNA
ataaagaatgaagctcccattgc

SEQ ID NO: 717 - RNA, 23 nt, synthetic construct
  source 1..23: mol_type = other RNA
atcaaactggtaaagaatgaagc

SEQ ID NO: 718 - RNA, 23 nt, synthetic construct
  source 1..23: mol_type = other RNA
aaacaattcaaactggtaaagaa

SEQ ID NO: 719 - RNA, 23 nt, synthetic construct
  source 1..23: mol_type = other RNA
aaatccaaacaattcaaactggt

SEQ ID NO: 720 - RNA, 23 nt, synthetic construct
  source 1..23: mol_type = other RNA
aaagagtaaatccaaacaattca

SEQ ID NO: 721 - RNA, 23 nt, synthetic construct
  source 1..23: mol_type = other RNA
actgacttgaaaaatataagagt

SEQ ID NO: 722 - RNA, 23 nt, synthetic construct
  source 1..23: mol_type = other RNA
aggtttaatcctgacttgaaaaa

SEQ ID NO: 723 - RNA, 23 nt, synthetic construct
  source 1..23: mol_type = other RNA
ataaaagggtttaatcctgactt

SEQ ID NO: 724 - RNA, 23 nt, synthetic construct
  source 1..23: mol_type = other RNA
acgagaatatataaaagggttta

SEQ ID NO: 725 - RNA, 23 nt, synthetic construct
  source 1..23: mol_type = other RNA
atgttccgagaatatataaaagg

SEQ ID NO: 726 - RNA, 23 nt, synthetic construct
  source 1..23: mol_type = other RNA
atgcactgttccgagaatatata

SEQ ID NO: 727 - RNA, 23 nt, synthetic construct
  source 1..23: mol_type = other RNA
aagccctgcactgttccgagaat

SEQ ID NO: 728 - RNA, 23 nt, synthetic construct
  source 1..23: mol_type = other RNA
aactttccttctcagccctgcac

SEQ ID NO: 729 - RNA, 23 nt, synthetic construct
  source 1..23: mol_type = other RNA
aagagcactttccttctcagccc

SEQ ID NO: 730 - RNA, 23 nt, synthetic construct
  source 1..23: mol_type = other RNA
agcaccagagcactttccttctc

SEQ ID NO: 731 - RNA, 23 nt, synthetic construct
  source 1..23: mol_type = other RNA
actatgtattggaggcaccagag

SEQ ID NO: 732 - RNA, 23 nt, synthetic construct
  source 1..23: mol_type = other RNA
accaggcctatgtattggaggca

SEQ ID NO: 733 - RNA, 23 nt, synthetic construct
  source 1..23: mol_type = other RNA
aaaaacccaggcctatgtattgg

SEQ ID NO: 734 - RNA, 23 nt, synthetic construct
  source 1..23: mol_type = other RNA
atcttttgtttgcagcagaaaaa

SEQ ID NO: 735 - RNA, 23 nt, synthetic construct
  source 1..23: mol_type = other RNA
aagtcgagtcttttgtttgcagc

SEQ ID NO: 736 - RNA, 23 nt, synthetic construct
  source 1..23: mol_type = other RNA
actcgaagtcgagtcttttgttt

SEQ ID NO: 737 - RNA, 23 nt, synthetic construct
  source 1..23: mol_type = other RNA
acatggctcgaagtcgagtcttt

SEQ ID NO: 738 - RNA, 23 nt, synthetic construct
  source 1..23: mol_type = other RNA
attttcccatggctcgaagtcga

SEQ ID NO: 739 - RNA, 23 nt, synthetic construct
  source 1..23: mol_type = other RNA
attcccttttcccatggctcgaa

SEQ ID NO: 740 - RNA, 23 nt, synthetic construct
  source 1..23: mol_type = other RNA
acgaggttcccttttcccatggc

SEQ ID NO: 741 - RNA, 23 nt, synthetic construct
  source 1..23: mol_type = other RNA
attgacttcgaggttcccttttc

SEQ ID NO: 742 - RNA, 23 nt, synthetic construct
  source 1..23: mol_type = other RNA
atttctgttgacttcgaggttcc

SEQ ID NO: 743 - RNA, 23 nt, synthetic construct
  source 1..23: mol_type = other RNA
agatttgtttctgttgacttcga

SEQ ID NO: 744 - RNA, 23 nt, synthetic construct
  source 1..23: mol_type = other RNA
agggaggatttgtttctgttgac

SEQ ID NO: 745 - RNA, 23 nt, synthetic construct
  source 1..23: mol_type = other RNA
acatgatgggaggatttgtttct

SEQ ID NO: 746 - RNA, 23 nt, synthetic construct
  source 1..23: mol_type = other RNA
attgtttcatgatgggaggattt

SEQ ID NO: 747 - RNA, 23 nt, synthetic construct
  source 1..23: mol_type = other RNA
aagagtttgtttcatgatgggag

SEQ ID NO: 748 - RNA, 23 nt, synthetic construct
  source 1..23: mol_type = other RNA
agtaggcagagtttgtttcatga

SEQ ID NO: 749 - RNA, 23 nt, synthetic construct
  source 1..23: mol_type = other RNA
aagataacatgtaggcagagttt

SEQ ID NO: 750 - RNA, 23 nt, synthetic construct
  source 1..23: mol_type = other RNA
atttggagataacatgtaggcag

SEQ ID NO: 751 - RNA, 23 nt, synthetic construct
  source 1..23: mol_type = other RNA
agtggctttggagataacatgta

SEQ ID NO: 752 - RNA, 23 nt, synthetic construct
  source 1..23: mol_type = other RNA
aatttcttctgtggctttggaga

SEQ ID NO: 753 - RNA, 23 nt, synthetic construct
  source 1..23: mol_type = other RNA
acacaaatttcttctgtggcttt

SEQ ID NO: 754 - RNA, 23 nt, synthetic construct
  source 1..23: mol_type = other RNA
atggtccacaaatttcttctgtg

SEQ ID NO: 755 - RNA, 23 nt, synthetic construct
  source 1..23: mol_type = other RNA
aaagcctggtccacaaatttctt

SEQ ID NO: 756 - RNA, 23 nt, synthetic construct
  source 1..23: mol_type = other RNA
aacttgggccacaagcctggtcc

SEQ ID NO: 757 - RNA, 23 nt, synthetic construct
  source 1..23: mol_type = other RNA
atttgaatgacttgggccacaag

SEQ ID NO: 758 - RNA, 23 nt, synthetic construct
  source 1..23: mol_type = other RNA
atttcttttgaatgacttgggcc

SEQ ID NO: 759 - RNA, 23 nt, synthetic construct
  source 1..23: mol_type = other RNA
aaccatactttcttttgaatgac

SEQ ID NO: 760 - RNA, 23 nt, synthetic construct
  source 1..23: mol_type = other RNA
agactcaccatactttcttttga

SEQ ID NO: 761 - RNA, 23 nt, synthetic construct
  source 1..23: mol_type = other RNA
aatcttgggactcaccatacttt

SEQ ID NO: 762 - RNA, 23 nt, synthetic construct
  source 1..23: mol_type = other RNA
aagcagagatcttgggactcacc

SEQ ID NO: 763 - RNA, 23 nt, synthetic construct
  source 1..23: mol_type = other RNA
atgtccagcagagatcttgggac

SEQ ID NO: 764 - RNA, 23 nt, synthetic construct
  source 1..23: mol_type = other RNA
agttgatgtccagcagagatctt

SEQ ID NO: 765 - RNA, 23 nt, synthetic construct
  source 1..23: mol_type = other RNA
aacagtgttgatgtccagcagag

SEQ ID NO: 766 - RNA, 23 nt, synthetic construct
  source 1..23: mol_type = other RNA
actgaccacagtgttgatgtcca

SEQ ID NO: 767 - RNA, 23 nt, synthetic construct
  source 1..23: mol_type = other RNA
aagctgctctgaccacagtgttg

SEQ ID NO: 768 - RNA, 23 nt, synthetic construct
  source 1..23: mol_type = other RNA
aaaggttcaatccgagtgttgat

SEQ ID NO: 769 - RNA, 23 nt, synthetic construct
  source 1..23: mol_type = other RNA
agtagtaaggttcaatccgagtg

SEQ ID NO: 770 - RNA, 23 nt, synthetic construct
  source 1..23: mol_type = other RNA
agatgctgtagtaaggttcaatc

SEQ ID NO: 771 - RNA, 23 nt, synthetic construct
  source 1..23: mol_type = other RNA
attatagatgctgtagtaaggtt

SEQ ID NO: 772 - RNA, 23 nt, synthetic construct
  source 1..23: mol_type = other RNA
atgctgttatagatgctgtagta

SEQ ID NO: 773 - RNA, 23 nt, synthetic construct
  source 1..23: mol_type = other RNA
aaagggctgctgttatagatgct

SEQ ID NO: 774 - RNA, 23 nt, synthetic construct
  source 1..23: mol_type = other RNA
aaagttacatgggctgctctcct

SEQ ID NO: 775 - RNA, 23 nt, synthetic construct
  source 1..23: mol_type = other RNA
agctgtaagttacatgggctgct

SEQ ID NO: 776 - RNA, 23 nt, synthetic construct
  source 1..23: mol_type = other RNA
attactggctgtaagttacatgg

SEQ ID NO: 777 - RNA, 23 nt, synthetic construct
  source 1..23: mol_type = other RNA
aaagagtttactggctgtaagtt

SEQ ID NO: 778 - RNA, 23 nt, synthetic construct
  source 1..23: mol_type = other RNA
aaatccaaaagagtttactggct

SEQ ID NO: 779 - RNA, 23 nt, synthetic construct
  source 1..23: mol_type = other RNA
aattggcaaatccaaaagagttt

SEQ ID NO: 780 - RNA, 23 nt, synthetic construct
  source 1..23: mol_type = other RNA
aaatatatgaattggcaaatcca

SEQ ID NO: 781 - RNA, 23 nt, synthetic construct
  source 1..23: mol_type = other RNA
aatgcatggcaatatatgaattg

SEQ ID NO: 782 - RNA, 23 nt, synthetic construct
  source 1..23: mol_type = other RNA
agtgataatgcatggcaatatat

SEQ ID NO: 783 - RNA, 23 nt, synthetic construct
  source 1..23: mol_type = other RNA
attagtggtgtgataatgcatgg

SEQ ID NO: 784 - RNA, 23 nt, synthetic construct
  source 1..23: mol_type = other RNA
aaagtcattagtggtgtgataat

SEQ ID NO: 785 - RNA, 23 nt, synthetic construct
  source 1..23: mol_type = other RNA
agcactaagtcattagtggtgtg

SEQ ID NO: 786 - RNA, 23 nt, synthetic construct
  source 1..23: mol_type = other RNA
atattcctgcactaagtcattag

SEQ ID NO: 787 - RNA, 23 nt, synthetic construct
  source 1..23: mol_type = other RNA
actgtcatattcctgcactaagt

SEQ ID NO: 788 - RNA, 23 nt, synthetic construct
  source 1..23: mol_type = other RNA
aaagtgctgtcatattcctgcac

SEQ ID NO: 789 - RNA, 23 nt, synthetic construct
  source 1..23: mol_type = other RNA
attggctgaagtgctgtcatatt

SEQ ID NO: 790 - RNA, 23 nt, synthetic construct
  source 1..23: mol_type = other RNA
agaatctgcttggctgaagtgct

SEQ ID NO: 791 - RNA, 23 nt, synthetic construct
  source 1..23: mol_type = other RNA
agactggaatctgcttggctgaa

SEQ ID NO: 792 - RNA, 23 nt, synthetic construct
  source 1..23: mol_type = other RNA
actccatgactttaaacggaggg

SEQ ID NO: 793 - RNA, 23 nt, synthetic construct
  source 1..23: mol_type = other RNA
acctatagcctccatgactttaa

SEQ ID NO: 794 - RNA, 23 nt, synthetic construct
  source 1..23: mol_type = other RNA
acataagatcctatagcctccat

SEQ ID NO: 795 - RNA, 23 nt, synthetic construct
  source 1..23: mol_type = other RNA
agtttacataagatcctatagcc

SEQ ID NO: 796 - RNA, 23 nt, synthetic construct
  source 1..23: mol_type = other RNA
aaaactgtttacataagatccta

SEQ ID NO: 797 - RNA, 23 nt, synthetic construct
  source 1..23: mol_type = other RNA
aatcagaaacaaaaactgtttac

SEQ ID NO: 798 - RNA, 23 nt, synthetic construct
  source 1..23: mol_type = other RNA
attactatcagaaacaaaaactg

SEQ ID NO: 799 - RNA, 23 nt, synthetic construct
  source 1..23: mol_type = other RNA
agtccattactatcagaaacaaa

SEQ ID NO: 800 - RNA, 23 nt, synthetic construct
  source 1..23: mol_type = other RNA
aataaagtccattactatcagaa

SEQ ID NO: 801 - RNA, 23 nt, synthetic construct
  source 1..23: mol_type = other RNA
aaagttagaataaagtccattac

SEQ ID NO: 802 - RNA, 23 nt, synthetic construct
  source 1..23: mol_type = other RNA
atgatctcaagttagaataaagt

SEQ ID NO: 803 - RNA, 23 nt, synthetic construct
  source 1..23: mol_type = other RNA
agccactgatctcaagttagaat

SEQ ID NO: 804 - RNA, 23 nt, synthetic construct
  source 1..23: mol_type = other RNA
atttgatccgccactgatctcaa

SEQ ID NO: 805 - RNA, 23 nt, synthetic construct
  source 1..23: mol_type = other RNA
ataggttttgatccgccactgat

SEQ ID NO: 806 - RNA, 23 nt, synthetic construct
  source 1..23: mol_type = other RNA
aaatcttgtaggttttgatccgc

SEQ ID NO: 807 - RNA, 23 nt, synthetic construct
  source 1..23: mol_type = other RNA
aagttgaatcttgtaggttttga

SEQ ID NO: 808 - RNA, 23 nt, synthetic construct
  source 1..23: mol_type = other RNA
attttcagttgaatcttgtaggt

SEQ ID NO: 809 - RNA, 23 nt, synthetic construct
  source 1..23: mol_type = other RNA
accaacttttcagttgaatcttg

SEQ ID NO: 810 - RNA, 23 nt, synthetic construct
  source 1..23: mol_type = other RNA
ataactgccaacttttcagttga

SEQ ID NO: 811 - RNA, 23 nt, synthetic construct
  source 1..23: mol_type = other RNA
aaaaccataactgccaacttttc

SEQ ID NO: 812 - RNA, 23 nt, synthetic construct
  source 1..23: mol_type = other RNA
aaaagaaaaccataactgccaac

SEQ ID NO: 813 - RNA, 23 nt, synthetic construct
  source 1..23: mol_type = other RNA
aagatgaaagaaaaccataactg

SEQ ID NO: 814 - RNA, 23 nt, synthetic construct
  source 1..23: mol_type = other RNA
atgacacatcagatgaaagaaaa

SEQ ID NO: 815 - RNA, 23 nt, synthetic construct
  source 1..23: mol_type = other RNA
aagatactgacacatcagatgaa

SEQ ID NO: 816 - RNA, 23 nt, synthetic construct
  source 1..23: mol_type = other RNA
aatcaacagatactgacacatca

SEQ ID NO: 817 - RNA, 23 nt, synthetic construct
  source 1..23: mol_type = other RNA
aaagcaaatcaacagatactgac

SEQ ID NO: 818 - RNA, 23 nt, synthetic construct
  source 1..23: mol_type = other RNA
aaaactacaaagcaaatcaacag

SEQ ID NO: 819 - RNA, 23 nt, synthetic construct
  source 1..23: mol_type = other RNA
aatgtcaacaaactacaaagcaa

SEQ ID NO: 820 - RNA, 23 nt, synthetic construct
  source 1..23: mol_type = other RNA
attaagatgtcaacaaactacaa

SEQ ID NO: 821 - RNA, 23 nt, synthetic construct
  source 1..23: mol_type = other RNA
aaaatcttaagatgtcaacaaac

SEQ ID NO: 822 - RNA, 23 nt, synthetic construct
  source 1..23: mol_type = other RNA
aacatcaaatcttaagatgtcaa

SEQ ID NO: 823 - RNA, 23 nt, synthetic construct
  source 1..23: mol_type = other RNA
aactttcacatcaaatcttaaga

SEQ ID NO: 824 - RNA, 23 nt, synthetic construct
  source 1..23: mol_type = other RNA
atctaaaactttcacatcaaatc

SEQ ID NO: 825 - RNA, 23 nt, synthetic construct
  source 1..23: mol_type = other RNA
tactagaggcatcatcgccatcg

SEQ ID NO: 826 - RNA, 23 nt, synthetic construct
  source 1..23: mol_type = other RNA
tatgcaggactagaggcatcatc

SEQ ID NO: 827 - RNA, 23 nt, synthetic construct
  source 1..23: mol_type = other RNA
tggatgatgcaggactagaggca

SEQ ID NO: 828 - RNA, 23 nt, synthetic construct
  source 1..23: mol_type = other RNA
tcgctctggatgatgcaggacta

SEQ ID NO: 829 - RNA, 23 nt, synthetic construct
  source 1..23: mol_type = other RNA
ttcctccatctcgcagtccggac

SEQ ID NO: 830 - RNA, 23 nt, synthetic construct
  source 1..23: mol_type = other RNA
tacagataagcctgccgggtggc

SEQ ID NO: 831 - RNA, 23 nt, synthetic construct
  source 1..23: mol_type = other RNA
tccaagacagataagcctgccgg

SEQ ID NO: 832 - RNA, 23 nt, synthetic construct
  source 1..23: mol_type = other RNA
taaaagaggcccaagacagataa

SEQ ID NO: 833 - RNA, 23 nt, synthetic construct
  source 1..23: mol_type = other RNA
tgtgacaaaagaggcccaagaca

SEQ ID NO: 834 - RNA, 23 nt, synthetic construct
  source 1..23: mol_type = other RNA
taatatgtgacaaaagaggccca

SEQ ID NO: 835 - RNA, 23 nt, synthetic construct
  source 1..23: mol_type = other RNA
tatgagcaatatgtgacaaaaga

SEQ ID NO: 836 - RNA, 23 nt, synthetic construct
  source 1..23: mol_type = other RNA
ttcacagatgagcaatatgtgac

SEQ ID NO: 837 - RNA, 23 nt, synthetic construct
  source 1..23: mol_type = other RNA
ttcagctcacagatgagcaatat

SEQ ID NO: 838 - RNA, 23 nt, synthetic construct
  source 1..23: mol_type = other RNA
tagggcctcagctcacagatgag

SEQ ID NO: 839 - RNA, 23 nt, synthetic construct
  source 1..23: mol_type = other RNA
tatactcagtgagtcagggcctc

SEQ ID NO: 840 - RNA, 23 nt, synthetic construct
  source 1..23: mol_type = other RNA
tcaaaaatactcagtgagtcagg

SEQ ID NO: 841 - RNA, 23 nt, synthetic construct
  source 1..23: mol_type = other RNA
taatgtctccttcttctgctccc

SEQ ID NO: 842 - RNA, 23 nt, synthetic construct
  source 1..23: mol_type = other RNA
tagagaaatgtctccttcttctg

SEQ ID NO: 843 - RNA, 23 nt, synthetic construct
  source 1..23: mol_type = other RNA
ttttcggagagaaatgtctcctt

SEQ ID NO: 844 - RNA, 23 nt, synthetic construct
  source 1..23: mol_type = other RNA
tagttcattttcggagagaaatg

SEQ ID NO: 845 - RNA, 23 nt, synthetic construct
  source 1..23: mol_type = other RNA
ttgttgagttcattttcggagag

SEQ ID NO: 846 - RNA, 23 nt, synthetic construct
  source 1..23: mol_type = other RNA
ttggcctgttgagttcattttcg

SEQ ID NO: 847 - RNA, 23 nt, synthetic construct
  source 1..23: mol_type = other RNA
tgaaggtggcctgttgagttcat

SEQ ID NO: 848 - RNA, 23 nt, synthetic construct
  source 1..23: mol_type = other RNA
tgcatcctgaaggtggcctgttg

SEQ ID NO: 849 - RNA, 23 nt, synthetic construct
  source 1..23: mol_type = other RNA
taggcacatggagcgaggtggca

SEQ ID NO: 850 - RNA, 23 nt, synthetic construct
  source 1..23: mol_type = other RNA
tgagtgaggcacatggagcgagg

SEQ ID NO: 851 - RNA, 23 nt, synthetic construct
  source 1..23: mol_type = other RNA
tttcctgtgagtgaggcacatgg

SEQ ID NO: 852 - RNA, 23 nt, synthetic construct
  source 1..23: mol_type = other RNA
ttttccttcctgtgagtgaggca

SEQ ID NO: 853 - RNA, 23 nt, synthetic construct
  source 1..23: mol_type = other RNA
taggtgctgtttccttcctgtga

SEQ ID NO: 854 - RNA, 23 nt, synthetic construct
  source 1..23: mol_type = other RNA
tgagagaggtgctgtttccttcc

SEQ ID NO: 855 - RNA, 23 nt, synthetic construct
  source 1..23: mol_type = other RNA
tctgaagaccctcctggagagag

SEQ ID NO: 856 - RNA, 23 nt, synthetic construct
  source 1..23: mol_type = other RNA
tagatcctgaagaccctcctgga

SEQ ID NO: 857 - RNA, 23 nt, synthetic construct
  source 1..23: mol_type = other RNA
ttggatgagatcctgaagaccct

SEQ ID NO: 858 - RNA, 23 nt, synthetic construct
  source 1..23: mol_type = other RNA
tctgtgtggatgagatcctgaag

SEQ ID NO: 859 - RNA, 23 nt, synthetic construct
  source 1..23: mol_type = other RNA
tcaaggtggctgtgtggatgaga

SEQ ID NO: 860 - RNA, 23 nt, synthetic construct
  source 1..23: mol_type = other RNA
tgtcaccaaggtggctgtgtgga

SEQ ID NO: 861 - RNA, 23 nt, synthetic construct
  source 1..23: mol_type = other RNA
ttacaggtcaccaaggtggctgt

SEQ ID NO: 862 - RNA, 23 nt, synthetic construct
  source 1..23: mol_type = other RNA
taaaagtacaggtcaccaaggtg

SEQ ID NO: 863 - RNA, 23 nt, synthetic construct
  source 1..23: mol_type = other RNA
tagtagaaaagtacaggtcacca

SEQ ID NO: 864 - RNA, 23 nt, synthetic construct
  source 1..23: mol_type = other RNA
tatgaccgccagtagaaaagtac

SEQ ID NO: 865 - RNA, 23 nt, synthetic construct
  source 1..23: mol_type = other RNA
tagaagatgaccgccagtagaaa

SEQ ID NO: 866 - RNA, 23 nt, synthetic construct
  source 1..23: mol_type = other RNA
taacccaggcagaagatgaccgc

SEQ ID NO: 867 - RNA, 23 nt, synthetic construct
  source 1..23: mol_type = other RNA
tccataggaacccaggcagaaga

SEQ ID NO: 868 - RNA, 23 nt, synthetic construct
  source 1..23: mol_type = other RNA
tagttgccataggaacccaggca

SEQ ID NO: 869 - RNA, 23 nt, synthetic construct
  source 1..23: mol_type = other RNA
taatgaagttgccataggaaccc

SEQ ID NO: 870 - RNA, 23 nt, synthetic construct
  source 1..23: mol_type = other RNA
taagacaatgaagttgccatagg

SEQ ID NO: 871 - RNA, 23 nt, synthetic construct
  source 1..23: mol_type = other RNA
tacaagaagacaatgaagttgcc

SEQ ID NO: 872 - RNA, 23 nt, synthetic construct
  source 1..23: mol_type = other RNA
tgaaggacaagaagacaatgaag

SEQ ID NO: 873 - RNA, 23 nt, synthetic construct
  source 1..23: mol_type = other RNA
ttcgaagaaggacaagaagacaa

SEQ ID NO: 874 - RNA, 23 nt, synthetic construct
  source 1..23: mol_type = other RNA
tctggatcgaagaaggacaagaa

SEQ ID NO: 875 - RNA, 23 nt, synthetic construct
  source 1..23: mol_type = other RNA
tgaaggctggatcgaagaaggac

SEQ ID NO: 876 - RNA, 23 nt, synthetic construct
  source 1..23: mol_type = other RNA
taatttcctgaaggctggatcga

SEQ ID NO: 877 - RNA, 23 nt, synthetic construct
  source 1..23: mol_type = other RNA
tttctgaatttcctgaaggctgg

SEQ ID NO: 878 - RNA, 23 nt, synthetic construct
  source 1..23: mol_type = other RNA
tgttggttctgaatttcctgaag

SEQ ID NO: 879 - RNA, 23 nt, synthetic construct
  source 1..23: mol_type = other RNA
taatcaaagttggttctgaattt

SEQ ID NO: 880 - RNA, 23 nt, synthetic construct
  source 1..23: mol_type = other RNA
ttcatgaaatcaaagttggttct

SEQ ID NO: 881 - RNA, 23 nt, synthetic construct
  source 1..23: mol_type = other RNA
tttcaggatcatgaaatcaaagt

SEQ ID NO: 882 - RNA, 23 nt, synthetic construct
  source 1..23: mol_type = other RNA
tgacaggttcaggatcatgaaat

SEQ ID NO: 883 - RNA, 23 nt, synthetic construct
  source 1..23: mol_type = other RNA
tagaaggacaggttcaggatcat

SEQ ID NO: 884 - RNA, 23 nt, synthetic construct
  source 1..23: mol_type = other RNA
tggtcacagaaggacaggttcag

SEQ ID NO: 885 - RNA, 23 nt, synthetic construct
  source 1..23: mol_type = other RNA
tgaagaggtcacagaaggacagg

SEQ ID NO: 886 - RNA, 23 nt, synthetic construct
  source 1..23: mol_type = other RNA
tcaaatgaagaggtcacagaagg

SEQ ID NO: 887 - RNA, 23 nt, synthetic construct
  source 1..23: mol_type = other RNA
tactccacaaatgaagaggtcac

SEQ ID NO: 888 - RNA, 23 nt, synthetic construct
  source 1..23: mol_type = other RNA
tctgtcactccacaaatgaagag

SEQ ID NO: 889 - RNA, 23 nt, synthetic construct
  source 1..23: mol_type = other RNA
tataacacaaaggtgaacatggg

SEQ ID NO: 890 - RNA, 23 nt, synthetic construct
  source 1..23: mol_type = other RNA
tgaagaataacacaaaggtgaac

SEQ ID NO: 891 - RNA, 23 nt, synthetic construct
  source 1..23: mol_type = other RNA
tgagctgaagaataacacaaagg

SEQ ID NO: 892 - RNA, 23 nt, synthetic construct
  source 1..23: mol_type = other RNA
ttggctgagctgaagaataacac

SEQ ID NO: 893 - RNA, 23 nt, synthetic construct
  source 1..23: mol_type = other RNA
tggatactactggctgagctgaa

SEQ ID NO: 894 - RNA, 23 nt, synthetic construct
  source 1..23: mol_type = other RNA
tatccgggatactactggctgag

SEQ ID NO: 895 - RNA, 23 nt, synthetic construct
  source 1..23: mol_type = other RNA
tagaaagcatccgggatactact

SEQ ID NO: 896 - RNA, 23 nt, synthetic construct
  source 1..23: mol_type = other RNA
tgaagcagaaagcatccgggata

SEQ ID NO: 897 - RNA, 23 nt, synthetic construct
  source 1..23: mol_type = other RNA
taaagtgaagcagaaagcatccg

SEQ ID NO: 898 - RNA, 23 nt, synthetic construct
  source 1..23: mol_type = other RNA
tgatggaaagtgaagcagaaagc

SEQ ID NO: 899 - RNA, 23 nt, synthetic construct
  source 1..23: mol_type = other RNA
taactggtgagatggaaagtgaa

SEQ ID NO: 900 - RNA, 23 nt, synthetic construct
  source 1..23: mol_type = other RNA
tagcctgaactggtgagatggaa

SEQ ID NO: 901 - RNA, 23 nt, synthetic construct
  source 1..23: mol_type = other RNA
tgatgaagcctgaactggtgaga

SEQ ID NO: 902 - RNA, 23 nt, synthetic construct
  source 1..23: mol_type = other RNA
tatgatgatgaagcctgaactgg

SEQ ID NO: 903 - RNA, 23 nt, synthetic construct
  source 1..23: mol_type = other RNA
tgagacatgatgatgaagcctga

SEQ ID NO: 904 - RNA, 23 nt, synthetic construct
  source 1..23: mol_type = other RNA
tcttcagagacatgatgatgaag

SEQ ID NO: 905 - RNA, 23 nt, synthetic construct
  source 1..23: mol_type = other RNA
tactgtcttcagagacatgatga

SEQ ID NO: 906 - RNA, 23 nt, synthetic construct
  source 1..23: mol_type = other RNA
tactgccactgtcttcagagaca

SEQ ID NO: 907 - RNA, 23 nt, synthetic construct
  source 1..23: mol_type = other RNA
tgcagggcgatcactgccactgt

SEQ ID NO: 908 - RNA, 23 nt, synthetic construct
  source 1..23: mol_type = other RNA
taacaccatccggagccggtgca

SEQ ID NO: 909 - RNA, 23 nt, synthetic construct
  source 1..23: mol_type = other RNA
taggccgtgcgattaggctgttt

SEQ ID NO: 910 - RNA, 23 nt, synthetic construct
  source 1..23: mol_type = other RNA
taaaggaggccgtgcgattaggc

SEQ ID NO: 911 - RNA, 23 nt, synthetic construct
  source 1..23: mol_type = other RNA
tcagggaaaggaggccgtgcgat

SEQ ID NO: 912 - RNA, 23 nt, synthetic construct
  source 1..23: mol_type = other RNA
ttacggtgcagggaaaggaggcc

SEQ ID NO: 913 - RNA, 23 nt, synthetic construct
  source 1..23: mol_type = other RNA
taggagtacggtgcagggaaagg

SEQ ID NO: 914 - RNA, 23 nt, synthetic construct
  source 1..23: mol_type = other RNA
tagggtgaggagtacggtgcagg

SEQ ID NO: 915 - RNA, 23 nt, synthetic construct
  source 1..23: mol_type = other RNA
tagagaagcagggtgaggagtac

SEQ ID NO: 916 - RNA, 23 nt, synthetic construct
  source 1..23: mol_type = other RNA
tgtggcccagagaagcagggtga

SEQ ID NO: 917 - RNA, 23 nt, synthetic construct
  source 1..23: mol_type = other RNA
taaactggtggcccagagaagca

SEQ ID NO: 918 - RNA, 23 nt, synthetic construct
  source 1..23: mol_type = other RNA
tgggtgaaactggtggcccagag

SEQ ID NO: 919 - RNA, 23 nt, synthetic construct
  source 1..23: mol_type = other RNA
ttggcaagggtgaaactggtggc

SEQ ID NO: 920 - RNA, 23 nt, synthetic construct
  source 1..23: mol_type = other RNA
tagccaaggtggcaagggtgaaa

SEQ ID NO: 921 - RNA, 23 nt, synthetic construct
  source 1..23: mol_type = other RNA
tttcaaggtagccaaggtggcaa

SEQ ID NO: 922 - RNA, 23 nt, synthetic construct
  source 1..23: mol_type = other RNA
ttggttttcaaggtagccaaggt

SEQ ID NO: 923 - RNA, 23 nt, synthetic construct
  source 1..23: mol_type = other RNA
tacttgctggttttcaaggtagc

SEQ ID NO: 924 - RNA, 23 nt, synthetic construct
  source 1..23: mol_type = other RNA
tagaggtgggacttgctggtttt

SEQ ID NO: 925 - RNA, 23 nt, synthetic construct
  source 1..23: mol_type = other RNA
tggaagacagaggtgggacttgc

SEQ ID NO: 926 - RNA, 23 nt, synthetic construct
  source 1..23: mol_type = other RNA
tgacatgggaagacagaggtggg

SEQ ID NO: 927 - RNA, 23 nt, synthetic construct
  source 1..23: mol_type = other RNA
tgactggacatgggaagacagag

SEQ ID NO: 928 - RNA, 23 nt, synthetic construct
  source 1..23: mol_type = other RNA
taatcagactggacatgggaaga

SEQ ID NO: 929 - RNA, 23 nt, synthetic construct
  source 1..23: mol_type = other RNA
tttttccagcaatcagactggac

SEQ ID NO: 930 - RNA, 23 nt, synthetic construct
  source 1..23: mol_type = other RNA
ttttcccttttccagcaatcaga

SEQ ID NO: 931 - RNA, 23 nt, synthetic construct
  source 1..23: mol_type = other RNA
taatggctttcccttttccagca

SEQ ID NO: 932 - RNA, 23 nt, synthetic construct
  source 1..23: mol_type = other RNA
tagacaaaatggctttccctttt

SEQ ID NO: 933 - RNA, 23 nt, synthetic construct
  source 1..23: mol_type = other RNA
tcatagagagacaaaatggcttt

SEQ ID NO: 934 - RNA, 23 nt, synthetic construct
  source 1..23: mol_type = other RNA
tgaccacatagagagacaaaatg

SEQ ID NO: 935 - RNA, 23 nt, synthetic construct
  source 1..23: mol_type = other RNA
taagtcgaccacatagagagaca

SEQ ID NO: 936 - RNA, 23 nt, synthetic construct
  source 1..23: mol_type = other RNA
tagaaggtgaagtcgaccacata

SEQ ID NO: 937 - RNA, 23 nt, synthetic construct
  source 1..23: mol_type = other RNA
tcaacacagaaggtgaagtcgac

SEQ ID NO: 938 - RNA, 23 nt, synthetic construct
  source 1..23: mol_type = other RNA
taccacagcaacacagaaggtga

SEQ ID NO: 939 - RNA, 23 nt, synthetic construct
  source 1..23: mol_type = other RNA
tagacagagaccacagcaacaca

SEQ ID NO: 940 - RNA, 23 nt, synthetic construct
  source 1..23: mol_type = other RNA
ttgtaagagacagagaccacagc

SEQ ID NO: 941 - RNA, 23 nt, synthetic construct
  source 1..23: mol_type = other RNA
tcatgatgtaagagacagagacc

SEQ ID NO: 942 - RNA, 23 nt, synthetic construct
  source 1..23: mol_type = other RNA
ttgagcaatcatgatgtaagaga

SEQ ID NO: 943 - RNA, 23 nt, synthetic construct
  source 1..23: mol_type = other RNA
tagggtctgagcaatcatgatgt

SEQ ID NO: 944 - RNA, 23 nt, synthetic construct
  source 1..23: mol_type = other RNA
tagcgttcttccgcagggtctga

SEQ ID NO: 945 - RNA, 23 nt, synthetic construct
  source 1..23: mol_type = other RNA
tgacttgagcgttcttccgcagg

SEQ ID NO: 946 - RNA, 23 nt, synthetic construct
  source 1..23: mol_type = other RNA
ttttctgacttgagcgttcttcc

SEQ ID NO: 947 - RNA, 23 nt, synthetic construct
  source 1..23: mol_type = other RNA
tggcactttctgacttgagcgtt

SEQ ID NO: 948 - RNA, 23 nt, synthetic construct
  source 1..23: mol_type = other RNA
tgaagcatcgactgtgattacag

SEQ ID NO: 949 - RNA, 23 nt, synthetic construct
  source 1..23: mol_type = other RNA
tgtggtctggaagcatcgactgt

SEQ ID NO: 950 - RNA, 23 nt, synthetic construct
  source 1..23: mol_type = other RNA
taaaggctgtggtctggaagcat

SEQ ID NO: 951 - RNA, 23 nt, synthetic construct
  source 1..23: mol_type = other RNA
tccatgaaaggctgtggtctgga

SEQ ID NO: 952 - RNA, 23 nt, synthetic construct
  source 1..23: mol_type = other RNA
tacactggatgggatctccacct

SEQ ID NO: 953 - RNA, 23 nt, synthetic construct
  source 1..23: mol_type = other RNA
tatggcacactggatgggatctc

SEQ ID NO: 954 - RNA, 23 nt, synthetic construct
  source 1..23: mol_type = other RNA
tgttcctatacagagccggcatg

SEQ ID NO: 955 - RNA, 23 nt, synthetic construct
  source 1..23: mol_type = other RNA
tttctggttcctatacagagccg

SEQ ID NO: 956 - RNA, 23 nt, synthetic construct
  source 1..23: mol_type = other RNA
ttgtaattctggttcctatacag

SEQ ID NO: 957 - RNA, 23 nt, synthetic construct
  source 1..23: mol_type = other RNA
tgtttgttgtaattctggttcct

SEQ ID NO: 958 - RNA, 23 nt, synthetic construct
  source 1..23: mol_type = other RNA
ttgctgcagtttgttgtaattct

SEQ ID NO: 959 - RNA, 23 nt, synthetic construct
  source 1..23: mol_type = other RNA
ttgaacgtgctgcagtttgttgt

SEQ ID NO: 960 - RNA, 23 nt, synthetic construct
  source 1..23: mol_type = other RNA
tcgggtctgaacgtgctgcagtt

SEQ ID NO: 961 - RNA, 23 nt, synthetic construct
  source 1..23: mol_type = other RNA
ttatccacgggtctgaacgtgct

SEQ ID NO: 962 - RNA, 23 nt, synthetic construct
  source 1..23: mol_type = other RNA
tttggtatatccacgggtctgaa

SEQ ID NO: 963 - RNA, 23 nt, synthetic construct
  source 1..23: mol_type = other RNA
tgactcttggtatatccacgggt

SEQ ID NO: 964 - RNA, 23 nt, synthetic construct
  source 1..23: mol_type = other RNA
tgttgggactcttggtatatcca

SEQ ID NO: 965 - RNA, 23 nt, synthetic construct
  source 1..23: mol_type = other RNA
tagttggttgggactcttggtat

SEQ ID NO: 966 - RNA, 23 nt, synthetic construct
  source 1..23: mol_type = other RNA
tgtgaccagttggttgggactct

SEQ ID NO: 967 - RNA, 23 nt, synthetic construct
  source 1..23: mol_type = other RNA
tacgagctggagtcggcttgctg

SEQ ID NO: 968 - RNA, 23 nt, synthetic construct
  source 1..23: mol_type = other RNA
tgctgatacgagctggagtcggc

SEQ ID NO: 969 - RNA, 23 nt, synthetic construct
  source 1..23: mol_type = other RNA
taggttgatggctgatacgagct

SEQ ID NO: 970 - RNA, 23 nt, synthetic construct
  source 1..23: mol_type = other RNA
tcagtggagaggttgatggctga

SEQ ID NO: 971 - RNA, 23 nt, synthetic construct
  source 1..23: mol_type = other RNA
tcttggcagtggagaggttgatg

SEQ ID NO: 972 - RNA, 23 nt, synthetic construct
  source 1..23: mol_type = other RNA
tgaatccttggcagtggagaggt

SEQ ID NO: 973 - RNA, 23 nt, synthetic construct
  source 1..23: mol_type = other RNA
tcggctttggaatccttggcagt

SEQ ID NO: 974 - RNA, 23 nt, synthetic construct
  source 1..23: mol_type = other RNA
tgtgaccacggctttggaatcct

SEQ ID NO: 975 - RNA, 23 nt, synthetic construct
  source 1..23: mol_type = other RNA
tacacaggtgaccacggctttgg

SEQ ID NO: 976 - RNA, 23 nt, synthetic construct
  source 1..23: mol_type = other RNA
taatgatcacacaggtgaccacg

SEQ ID NO: 977 - RNA, 23 nt, synthetic construct
  source 1..23: mol_type = other RNA
tagcacaatgatcacacaggtga

SEQ ID NO: 978 - RNA, 23 nt, synthetic construct
  source 1..23: mol_type = other RNA
tactgacagcacaatgatcacac

SEQ ID NO: 979 - RNA, 23 nt, synthetic construct
  source 1..23: mol_type = other RNA
tcacaccaggactgacagcacaa

SEQ ID NO: 980 - RNA, 23 nt, synthetic construct
  source 1..23: mol_type = other RNA
tagacagcacaccaggactgaca

SEQ ID NO: 981 - RNA, 23 nt, synthetic construct
  source 1..23: mol_type = other RNA
tagtggaagacagcacaccagga

SEQ ID NO: 982 - RNA, 23 nt, synthetic construct
  source 1..23: mol_type = other RNA
taaccacctgtaccaaggaaatc

SEQ ID NO: 983 - RNA, 23 nt, synthetic construct
  source 1..23: mol_type = other RNA
tgagagaaccacctgtaccaagg

SEQ ID NO: 984 - RNA, 23 nt, synthetic construct
  source 1..23: mol_type = other RNA
tccattgctggagagaaccacct

SEQ ID NO: 985 - RNA, 23 nt, synthetic construct
  source 1..23: mol_type = other RNA
tgaagctcccattgctggagaga

SEQ ID NO: 986 - RNA, 23 nt, synthetic construct
  source 1..23: mol_type = other RNA
ttaaagaatgaagctcccattgc

SEQ ID NO: 987 - RNA, 23 nt, synthetic construct
  source 1..23: mol_type = other RNA
ttcaaactggtaaagaatgaagc

SEQ ID NO: 988 - RNA, 23 nt, synthetic construct
  source 1..23: mol_type = other RNA
taacaattcaaactggtaaagaa

SEQ ID NO: 989 - RNA, 23 nt, synthetic construct
  source 1..23: mol_type = other RNA
taatccaaacaattcaaactggt

SEQ ID NO: 990 - RNA, 23 nt, synthetic construct
  source 1..23: mol_type = other RNA
taagagtaaatccaaacaattca

SEQ ID NO: 991 - RNA, 23 nt, synthetic construct
  source 1..23: mol_type = other RNA
tctgacttgaaaaatataagagt

SEQ ID NO: 992 - RNA, 23 nt, synthetic construct
  source 1..23: mol_type = other RNA
tggtttaatcctgacttgaaaaa

SEQ ID NO: 993 - RNA, 23 nt, synthetic construct
  source 1..23: mol_type = other RNA
ttaaaagggtttaatcctgactt

SEQ ID NO: 994 - RNA, 23 nt, synthetic construct
  source 1..23: mol_type = other RNA
tcgagaatatataaaagggttta

SEQ ID NO: 995 - RNA, 23 nt, synthetic construct
  source 1..23: mol_type = other RNA
ttgttccgagaatatataaaagg

SEQ ID NO: 996 - RNA, 23 nt, synthetic construct
  source 1..23: mol_type = other RNA
ttgcactgttccgagaatatata

SEQ ID NO: 997 - RNA, 23 nt, synthetic construct
  source 1..23: mol_type = other RNA
tagccctgcactgttccgagaat

SEQ ID NO: 998 - RNA, 23 nt, synthetic construct
  source 1..23: mol_type = other RNA
tactttccttctcagccctgcac

SEQ ID NO: 999 - RNA, 23 nt, synthetic construct
  source 1..23: mol_type = other RNA
tagagcactttccttctcagccc

SEQ ID NO: 1000 - RNA, 23 nt, synthetic construct
  source 1..23: mol_type = other RNA
tgcaccagagcactttccttctc

SEQ ID NO: 1001 - RNA, 23 nt, synthetic construct
  source 1..23: mol_type = other RNA
tctatgtattggaggcaccagag

SEQ ID NO: 1002 - RNA, 23 nt, synthetic construct
  source 1..23: mol_type = other RNA
tccaggcctatgtattggaggca

SEQ ID NO: 1003 - RNA, 23 nt, synthetic construct
  source 1..23: mol_type = other RNA
taaaacccaggcctatgtattgg

SEQ ID NO: 1004 - RNA, 23 nt, synthetic construct
  source 1..23: mol_type = other RNA
ttcttttgtttgcagcagaaaaa

SEQ ID NO: 1005 - RNA, 23 nt, synthetic construct
  source 1..23: mol_type = other RNA
tagtcgagtcttttgtttgcagc

SEQ ID NO: 1006 - RNA, 23 nt, synthetic construct
  source 1..23: mol_type = other RNA
tctcgaagtcgagtcttttgttt

SEQ ID NO: 1007 - RNA, 23 nt, synthetic construct
  source 1..23: mol_type = other RNA
tcatggctcgaagtcgagtcttt

SEQ ID NO: 1008 - RNA, 23 nt, synthetic construct
  source 1..23: mol_type = other RNA
tttttcccatggctcgaagtcga

SEQ ID NO: 1009 - RNA, 23 nt, synthetic construct
  source 1..23: mol_type = other RNA
tttcccttttcccatggctcgaa

SEQ ID NO: 1010 - RNA, 23 nt, synthetic construct
  source 1..23: mol_type = other RNA
tcgaggttcccttttcccatggc

SEQ ID NO: 1011 - RNA, 23 nt, synthetic construct
  source 1..23: mol_type = other RNA
tttgacttcgaggttcccttttc

SEQ ID NO: 1012 - RNA, 23 nt, synthetic construct
  source 1..23: mol_type = other RNA
ttttctgttgacttcgaggttcc

SEQ ID NO: 1013 - RNA, 23 nt, synthetic construct
  source 1..23: mol_type = other RNA
tgatttgtttctgttgacttcga

SEQ ID NO: 1014 - RNA, 23 nt, synthetic construct
  source 1..23: mol_type = other RNA
tgggaggatttgtttctgttgac

SEQ ID NO: 1015 - RNA, 23 nt, synthetic construct
  source 1..23: mol_type = other RNA
tcatgatgggaggatttgtttct

SEQ ID NO: 1016 - RNA, 23 nt, synthetic construct
  source 1..23: mol_type = other RNA
tttgtttcatgatgggaggattt

SEQ ID NO: 1017 - RNA, 23 nt, synthetic construct
  source 1..23: mol_type = other RNA
tagagtttgtttcatgatgggag

SEQ ID NO: 1018 - RNA, 23 nt, synthetic construct
  source 1..23: mol_type = other RNA
tgtaggcagagtttgtttcatga

SEQ ID NO: 1019 - RNA, 23 nt, synthetic construct
  source 1..23: mol_type = other RNA
tagataacatgtaggcagagttt

SEQ ID NO: 1020 - RNA, 23 nt, synthetic construct
  source 1..23: mol_type = other RNA
ttttggagataacatgtaggcag

SEQ ID NO: 1021 - RNA, 23 nt, synthetic construct
  source 1..23: mol_type = other RNA
tgtggctttggagataacatgta

SEQ ID NO: 1022 - RNA, 23 nt, synthetic construct
  source 1..23: mol_type = other RNA
tatttcttctgtggctttggaga

SEQ ID NO: 1023 - RNA, 23 nt, synthetic construct
  source 1..23: mol_type = other RNA
tcacaaatttcttctgtggcttt

SEQ ID NO: 1024 - RNA, 23 nt, synthetic construct
  source 1..23: mol_type = other RNA
ttggtccacaaatttcttctgtg

SEQ ID NO: 1025 - RNA, 23 nt, synthetic construct
  source 1..23: mol_type = other RNA
taagcctggtccacaaatttctt

SEQ ID NO: 1026 - RNA, 23 nt, synthetic construct
  source 1..23: mol_type = other RNA
tacttgggccacaagcctggtcc

SEQ ID NO: 1027 - RNA, 23 nt, synthetic construct
  source 1..23: mol_type = other RNA
ttttgaatgacttgggccacaag

SEQ ID NO: 1028 - RNA, 23 nt, synthetic construct
  source 1..23: mol_type = other RNA
ttttcttttgaatgacttgggcc

SEQ ID NO: 1029 - RNA, 23 nt, synthetic construct
  source 1..23: mol_type = other RNA
taccatactttcttttgaatgac

SEQ ID NO: 1030 - RNA, 23 nt, synthetic construct
  source 1..23: mol_type = other RNA
tgactcaccatactttcttttga

SEQ ID NO: 1031 - RNA, 23 nt, synthetic construct
  source 1..23: mol_type = other RNA
tatcttgggactcaccatacttt

SEQ ID NO: 1032 - RNA, 23 nt, synthetic construct
  source 1..23: mol_type = other RNA
tagcagagatcttgggactcacc

SEQ ID NO: 1033 - RNA, 23 nt, synthetic construct
  source 1..23: mol_type = other RNA
ttgtccagcagagatcttgggac

SEQ ID NO: 1034 - RNA, 23 nt, synthetic construct
  source 1..23: mol_type = other RNA
tgttgatgtccagcagagatctt

SEQ ID NO: 1035 - RNA, 23 nt, synthetic construct
  source 1..23: mol_type = other RNA
tacagtgttgatgtccagcagag

SEQ ID NO: 1036 - RNA, 23 nt, synthetic construct
  source 1..23: mol_type = other RNA
tctgaccacagtgttgatgtcca

SEQ ID NO: 1037 - RNA, 23 nt, synthetic construct
  source 1..23: mol_type = other RNA
tagctgctctgaccacagtgttg

SEQ ID NO: 1038 - RNA, 23 nt, synthetic construct
  source 1..23: mol_type = other RNA
taaggttcaatccgagtgttgat

SEQ ID NO: 1039 - RNA, 23 nt, synthetic construct
  source 1..23: mol_type = other RNA
tgtagtaaggttcaatccgagtg

SEQ ID NO: 1040 - RNA, 23 nt, synthetic construct
  source 1..23: mol_type = other RNA
tgatgctgtagtaaggttcaatc

SEQ ID NO: 1041 - RNA, 23 nt, synthetic construct
  source 1..23: mol_type = other RNA
tttatagatgctgtagtaaggtt

SEQ ID NO: 1042 - RNA, 23 nt, synthetic construct
  source 1..23: mol_type = other RNA
ttgctgttatagatgctgtagta

SEQ ID NO: 1043 - RNA, 23 nt, synthetic construct
  source 1..23: mol_type = other RNA
taagggctgctgttatagatgct

SEQ ID NO: 1044 - RNA, 23 nt, synthetic construct
  source 1..23: mol_type = other RNA
taagttacatgggctgctctcct

SEQ ID NO: 1045 - RNA, 23 nt, synthetic construct
  source 1..23: mol_type = other RNA
tgctgtaagttacatgggctgct

SEQ ID NO: 1046 - RNA, 23 nt, synthetic construct
  source 1..23: mol_type = other RNA
tttactggctgtaagttacatgg

SEQ ID NO: 1047 - RNA, 23 nt, synthetic construct
  source 1..23: mol_type = other RNA
taagagtttactggctgtaagtt

SEQ ID NO: 1048 - RNA, 23 nt, synthetic construct
  source 1..23: mol_type = other RNA
taatccaaaagagtttactggct

SEQ ID NO: 1049 - RNA, 23 nt, synthetic construct
  source 1..23: mol_type = other RNA
tattggcaaatccaaaagagttt

SEQ ID NO: 1050 - RNA, 23 nt, synthetic construct
  source 1..23: mol_type = other RNA
taatatatgaattggcaaatcca

SEQ ID NO: 1051 - RNA, 23 nt, synthetic construct
  source 1..23: mol_type = other RNA
tatgcatggcaatatatgaattg

SEQ ID NO: 1052 - RNA, 23 nt, synthetic construct
  source 1..23: mol_type = other RNA
tgtgataatgcatggcaatatat

SEQ ID NO: 1053 - RNA, 23 nt, synthetic construct
  source 1..23: mol_type = other RNA
tttagtggtgtgataatgcatgg

SEQ ID NO: 1054 - RNA, 23 nt, synthetic construct
  source 1..23: mol_type = other RNA
taagtcattagtggtgtgataat

SEQ ID NO: 1055 - RNA, 23 nt, synthetic construct
  source 1..23: mol_type = other RNA
tgcactaagtcattagtggtgtg

SEQ ID NO: 1056 - RNA, 23 nt, synthetic construct
  source 1..23: mol_type = other RNA
ttattcctgcactaagtcattag

SEQ ID NO: 1057 - RNA, 23 nt, synthetic construct
  source 1..23: mol_type = other RNA
tctgtcatattcctgcactaagt

SEQ ID NO: 1058 - RNA, 23 nt, synthetic construct
  source 1..23: mol_type = other RNA
taagtgctgtcatattcctgcac

SEQ ID NO: 1059 - RNA, 23 nt, synthetic construct
  source 1..23: mol_type = other RNA
tttggctgaagtgctgtcatatt

SEQ ID NO: 1060 - RNA, 23 nt, synthetic construct
  source 1..23: mol_type = other RNA
tgaatctgcttggctgaagtgct

SEQ ID NO: 1061 - RNA, 23 nt, synthetic construct
  source 1..23: mol_type = other RNA
tgactggaatctgcttggctgaa

SEQ ID NO: 1062 - RNA, 23 nt, synthetic construct
  source 1..23: mol_type = other RNA
tctccatgactttaaacggaggg

SEQ ID NO: 1063 - RNA, 23 nt, synthetic construct
  source 1..23: mol_type = other RNA
tcctatagcctccatgactttaa

SEQ ID NO: 1064 - RNA, 23 nt, synthetic construct
  source 1..23: mol_type = other RNA
tcataagatcctatagcctccat

SEQ ID NO: 1065 - RNA, 23 nt, synthetic construct
  source 1..23: mol_type = other RNA
tgtttacataagatcctatagcc

SEQ ID NO: 1066 - RNA, 23 nt, synthetic construct
  source 1..23: mol_type = other RNA
taaactgtttacataagatccta

SEQ ID NO: 1067 - RNA, 23 nt, synthetic construct
  source 1..23: mol_type = other RNA
tatcagaaacaaaaactgtttac

SEQ ID NO: 1068 - RNA, 23 nt, synthetic construct
  source 1..23: mol_type = other RNA
tttactatcagaaacaaaaactg

SEQ ID NO: 1069 - RNA, 23 nt, synthetic construct
  source 1..23: mol_type = other RNA
tgtccattactatcagaaacaaa

SEQ ID NO: 1070 - RNA, 23 nt, synthetic construct
  source 1..23: mol_type = other RNA
tataaagtccattactatcagaa

SEQ ID NO: 1071 - RNA, 23 nt, synthetic construct
  source 1..23: mol_type = other RNA
taagttagaataaagtccattac

SEQ ID NO: 1072 - RNA, 23 nt, synthetic construct
  source 1..23: mol_type = other RNA
ttgatctcaagttagaataaagt

SEQ ID NO: 1073 - RNA, 23 nt, synthetic construct
  source 1..23: mol_type = other RNA
tgccactgatctcaagttagaat

SEQ ID NO: 1074 - RNA, 23 nt, synthetic construct
  source 1..23: mol_type = other RNA
ttttgatccgccactgatctcaa

SEQ ID NO: 1075 - RNA, 23 nt, synthetic construct
  source 1..23: mol_type = other RNA
ttaggttttgatccgccactgat

SEQ ID NO: 1076 - RNA, 23 nt, synthetic construct
  source 1..23: mol_type = other RNA
taatcttgtaggttttgatccgc

SEQ ID NO: 1077 - RNA, 23 nt, synthetic construct
  source 1..23: mol_type = other RNA
tagttgaatcttgtaggttttga

SEQ ID NO: 1078 - RNA, 23 nt, synthetic construct
  source 1..23: mol_type = other RNA
tttttcagttgaatcttgtaggt

SEQ ID NO: 1079 - RNA, 23 nt, synthetic construct
  source 1..23: mol_type = other RNA
tccaacttttcagttgaatcttg

SEQ ID NO: 1080 - RNA, 23 nt, synthetic construct
  source 1..23: mol_type = other RNA
ttaactgccaacttttcagttga

SEQ ID NO: 1081 - RNA, 23 nt, synthetic construct
  source 1..23: mol_type = other RNA
taaaccataactgccaacttttc

SEQ ID NO: 1082 - RNA, 23 nt, synthetic construct
  source 1..23: mol_type = other RNA
taaagaaaaccataactgccaac

SEQ ID NO: 1083 - RNA, 23 nt, synthetic construct
  source 1..23: mol_type = other RNA
tagatgaaagaaaaccataactg

SEQ ID NO: 1084 - RNA, 23 nt, synthetic construct
  source 1..23: mol_type = other RNA
ttgacacatcagatgaaagaaaa

SEQ ID NO: 1085 - RNA, 23 nt, synthetic construct
  source 1..23: mol_type = other RNA
tagatactgacacatcagatgaa

SEQ ID NO: 1086 - RNA, 23 nt, synthetic construct
  source 1..23: mol_type = other RNA
tatcaacagatactgacacatca

SEQ ID NO: 1087 - RNA, 23 nt, synthetic construct
  source 1..23: mol_type = other RNA
taagcaaatcaacagatactgac

SEQ ID NO: 1088 - RNA, 23 nt, synthetic construct
  source 1..23: mol_type = other RNA
taaactacaaagcaaatcaacag

SEQ ID NO: 1089 - RNA, 23 nt, synthetic construct
  source 1..23: mol_type = other RNA
tatgtcaacaaactacaaagcaa

SEQ ID NO: 1090 - RNA, 23 nt, synthetic construct
  source 1..23: mol_type = other RNA
tttaagatgtcaacaaactacaa

SEQ ID NO: 1091 - RNA, 23 nt, synthetic construct
  source 1..23: mol_type = other RNA
taaatcttaagatgtcaacaaac

SEQ ID NO: 1092 - RNA, 23 nt, synthetic construct
  source 1..23: mol_type = other RNA
tacatcaaatcttaagatgtcaa

SEQ ID NO: 1093 - RNA, 23 nt, synthetic construct
  source 1..23: mol_type = other RNA
tactttcacatcaaatcttaaga

SEQ ID NO: 1094 - RNA, 23 nt, synthetic construct
  source 1..23: mol_type = other RNA
ttctaaaactttcacatcaaatc

SEQ ID NO: 1095 - RNA, 23 nt, synthetic construct
  source 1..23: mol_type = other RNA
  modified_base 1: mod_base = OTHER; note = 2'-O-methyladenosine-3'-phosphorothioate
  modified_base 2: mod_base = OTHER; note = 2'-deoxy-2'-fluoroadenosine-3'-phosphorothioate
  modified_base 3: mod_base = OTHER; note = 2'-O-methylcytidine-3'-phosphate
  modified_base 4: mod_base = OTHER; note = 2'-O-methyluridine-3'-phosphate
  modified_base 5: mod_base = OTHER; note = 2'-O-methyladenosine-3'-phosphate
  modified_base 6: mod_base = OTHER; note = 2'-deoxy-2'-fluoroguanosine-3'-phosphate
  modified_base 7: mod_base = OTHER; note = 2'-O-methyladenosine-3'-phosphate
  modified_base 8: mod_base = OTHER; note = 2'-deoxy-2'-fluoroguanosine-3'-phosphate
  modified_base 9: mod_base = OTHER; note = 2'-deoxy-2'-fluoroguanosine-3'-phosphate
  modified_base 10: mod_base = OTHER; note = 2'-O-methylcytidine-3'-phosphate
  modified_base 11: mod_base = OTHER; note = 2'-O-methyladenosine-3'-phosphate
  modified_base 12: mod_base = OTHER; note = 2'-O-methyluridine-3'-phosphate
  modified_base 13: mod_base = OTHER; note = 2'-O-methylcytidine-3'-phosphate
  modified_base 14: mod_base = OTHER; note = 2'-deoxy-2'-fluoroadenosine-3'-phosphate
  modified_base 15: mod_base = OTHER; note = 2'-O-methyluridine-3'-phosphate
  modified_base 16: mod_base = OTHER; note = 2'-deoxy-2'-fluorocytidine-3'-phosphate
  modified_base 17: mod_base = OTHER; note = 2'-O-methylguanosine-3'-phosphate
  modified_base 18: mod_base = OTHER; note = 2'-O-methylcytidine-3'-phosphate
  modified_base 19: mod_base = OTHER; note = 2'-O-methylcytidine-3'-phosphate
  modified_base 20: mod_base = OTHER; note = 2'-O-methyladenosine-3'-phosphate
  modified_base 21: mod_base = OTHER; note = 2'-O-methyluridine-3'-phosphorothioate
  modified_base 22: mod_base = OTHER; note = 2'-O-methylcytidine-3'-phosphorothioate
  modified_base 23: mod_base = OTHER; note = 2'-O-methylguanosine
aactagaggcatcatcgccatcg

SEQ ID NO: 1096 - RNA, 23 nt, synthetic construct
  source 1..23: mol_type = other RNA
  modified_base 1: mod_base = OTHER; note = 2'-O-methyladenosine-3'-phosphorothioate
  modified_base 2: mod_base = OTHER; note = 2'-deoxy-2'-fluoroadenosine-3'-phosphorothioate
  modified_base 3: mod_base = OTHER; note = 2'-O-methyluridine-3'-phosphate
  modified_base 4: mod_base = OTHER; note = 2'-O-methylguanosine-3'-phosphate
  modified_base 5: mod_base = OTHER; note = 2'-O-methylcytidine-3'-phosphate
  modified_base 6: mod_base = OTHER; note = 2'-deoxy-2'-fluoroadenosine-3'-phosphate
  modified_base 7: mod_base = OTHER; note = 2'-O-methylguanosine-3'-phosphate
  modified_base 8: mod_base = OTHER; note = 2'-deoxy-2'-fluoroguanosine-3'-phosphate
  modified_base 9: mod_base = OTHER; note = 2'-deoxy-2'-fluoroadenosine-3'-phosphate
  modified_base 10: mod_base = OTHER; note = 2'-O-methylcytidine-3'-phosphate
  modified_base 11: mod_base = OTHER; note = 2'-O-methyluridine-3'-phosphate
  modified_base 12: mod_base = OTHER; note = 2'-O-methyladenosine-3'-phosphate
  modified_base 13: mod_base = OTHER; note = 2'-O-methylguanosine-3'-phosphate
  modified_base 14: mod_base = OTHER; note = 2'-deoxy-2'-fluoroadenosine-3'-phosphate
  modified_base 15: mod_base = OTHER; note = 2'-O-methylguanosine-3'-phosphate
  modified_base 16: mod_base = OTHER; note = 2'-deoxy-2'-fluoroguanosine-3'-phosphate
  modified_base 17: mod_base = OTHER; note = 2'-O-methylcytidine-3'-phosphate
  modified_base 18: mod_base = OTHER; note = 2'-O-methyladenosine-3'-phosphate
  modified_base 19: mod_base = OTHER; note = 2'-O-methyluridine-3'-phosphate
  modified_base 20: mod_base = OTHER; note = 2'-O-methylcytidine-3'-phosphate
  modified_base 21: mod_base = OTHER; note = 2'-O-methyladenosine-3'-phosphorothioate
  modified_base 22: mod_base = OTHER; note = 2'-O-methyluridine-3'-phosphorothioate
  modified_base 23: mod_base = OTHER; note = 2'-O-methylcytidine
aatgcaggactagaggcatcatc

SEQ ID NO: 1097 - RNA, 23 nt, synthetic construct
  source 1..23: mol_type = other RNA
  modified_base 1: mod_base = OTHER; note = 2'-O-methyladenosine-3'-phosphorothioate
  modified_base 2: mod_base = OTHER; note = 2'-deoxy-2'-fluoroguanosine-3'-phosphorothioate
  modified_base 3: mod_base = OTHER; note = 2'-O-methylguanosine-3'-phosphate
  modified_base 4: mod_base = OTHER; note = 2'-O-methyladenosine-3'-phosphate
  modified_base 5: mod_base = OTHER; note = 2'-O-methyluridine-3'-phosphate
  modified_base 6: mod_base = OTHER; note = 2'-deoxy-2'-fluoroguanosine-3'-phosphate
  modified_base 7: mod_base = OTHER; note = 2'-O-methyladenosine-3'-phosphate
  modified_base 8: mod_base = OTHER; note = 2'-deoxy-2'-fluorouridine-3'-phosphate
  modified_base 9: mod_base = OTHER; note = 2'-deoxy-2'-fluoroguanosine-3'-phosphate
  modified_base 10: mod_base = OTHER; note = 2'-O-methylcytidine-3'-phosphate
  modified_base 11: mod_base = OTHER; note = 2'-O-methyladenosine-3'-phosphate
  modified_base 12: mod_base = OTHER; note = 2'-O-methylguanosine-3'-phosphate
  modified_base 13: mod_base = OTHER; note = 2'-O-methylguanosine-3'-phosphate
  modified_base 14: mod_base = OTHER; note = 2'-deoxy-2'-fluoroadenosine-3'-phosphate
  modified_base 15: mod_base = OTHER; note = 2'-O-methylcytidine-3'-phosphate
  modified_base 16: mod_base = OTHER; note = 2'-deoxy-2'-fluorouridine-3'-phosphate
  modified_base 17: mod_base = OTHER; note = 2'-O-methyladenosine-3'-phosphate
  modified_base 18: mod_base = OTHER; note = 2'-O-methylguanosine-3'-phosphate
  modified_base 19: mod_base = OTHER; note = 2'-O-methyladenosine-3'-phosphate
  modified_base 20: mod_base = OTHER; note = 2'-O-methylguanosine-3'-phosphate
  modified_base 21: mod_base = OTHER; note = 2'-O-methylguanosine-3'-phosphorothioate
  modified_base 22: mod_base = OTHER; note = 2'-O-methylcytidine-3'-phosphorothioate
  modified_base 23: mod_base = OTHER; note = 2'-O-methyladenosine
aggatgatgcaggactagaggca

SEQ ID NO: 1098 - RNA, 23 nt, synthetic construct
  source 1..23: mol_type = other RNA
  modified_base 1: mod_base = OTHER; note = 2'-O-methyladenosine-3'-phosphorothioate
  modified_base 2: mod_base = OTHER; note = 2'-deoxy-2'-fluorocytidine-3'-phosphorothioate
  modified_base 3: mod_base = OTHER; note = 2'-O-methylguanosine-3'-phosphate
  modified_base 4: mod_base = OTHER; note = 2'-O-methylcytidine-3'-phosphate
  modified_base 5: mod_base = OTHER; note = 2'-O-methyluridine-3'-phosphate
  modified_base 6: mod_base = OTHER; note = 2'-deoxy-2'-fluorocytidine-3'-phosphate
  modified_base 7: mod_base = OTHER; note = 2'-O-methyluridine-3'-phosphate
  modified_base 8: mod_base = OTHER; note = 2'-deoxy-2'-fluoroguanosine-3'-phosphate
  modified_base 9: mod_base = OTHER; note = 2'-deoxy-2'-fluoroguanosine-3'-phosphate
  modified_base 10: mod_base = OTHER; note = 2'-O-methyladenosine-3'-phosphate
  modified_base 11: mod_base = OTHER; note = 2'-O-methyluridine-3'-phosphate
  modified_base 12: mod_base = OTHER; note = 2'-O-methylguanosine-3'-phosphate
  modified_base 13: mod_base = OTHER; note = 2'-O-methyladenosine-3'-phosphate
  modified_base 14: mod_base = OTHER; note = 2'-deoxy-2'-fluorouridine-3'-phosphate
  modified_base 15: mod_base = OTHER; note = 2'-O-methylguanosine-3'-phosphate
  modified_base 16: mod_base = OTHER; note = 2'-deoxy-2'-fluorocytidine-3'-phosphate
  modified_base 17: mod_base = OTHER; note = 2'-O-methyladenosine-3'-phosphate
  modified_base 18: mod_base = OTHER; note = 2'-O-methylguanosine-3'-phosphate
  modified_base 19: mod_base = OTHER; note = 2'-O-methylguanosine-3'-phosphate
  modified_base 20: mod_base = OTHER; note = 2'-O-methyladenosine-3'-phosphate
  modified_base 21: mod_base = OTHER; note = 2'-O-methylcytidine-3'-phosphorothioate
  modified_base 22: mod_base = OTHER; note = 2'-O-methyluridine-3'-phosphorothioate
  modified_base 23: mod_base = OTHER; note = 2'-O-methyladenosine
acgctctggatgatgcaggacta

SEQ ID NO: 1099 - RNA, 23 nt, synthetic construct
  source 1..23: mol_type = other RNA
  modified_base 1: mod_base = OTHER; note = 2'-O-methyladenosine-3'-phosphorothioate
  modified_base 2: mod_base = OTHER; note = 2'-deoxy-2'-fluorouridine-3'-phosphorothioate
  modified_base 3: mod_base = OTHER; note = 2'-O-methylcytidine-3'-phosphate
  modified_base 4: mod_base = OTHER; note = 2'-O-methylcytidine-3'-phosphate
  modified_base 5: mod_base = OTHER; note = 2'-O-methyluridine-3'-phosphate
  modified_base 6: mod_base = OTHER; note = 2'-deoxy-2'-fluorocytidine-3'-phosphate
  modified_base 7: mod_base = OTHER; note = 2'-O-methylcytidine-3'-phosphate
  modified_base 8: mod_base = OTHER; note = 2'-deoxy-2'-fluoroadenosine-3'-phosphate
  modified_base 9: mod_base = OTHER; note = 2'-deoxy-2'-fluorouridine-3'-phosphate
  modified_base 10: mod_base = OTHER; note = 2'-O-methylcytidine-3'-phosphate
  modified_base 11: mod_base = OTHER; note = 2'-O-methyluridine-3'-phosphate
  modified_base 12: mod_base = OTHER; note = 2'-O-methylcytidine-3'-phosphate
  modified_base 13: mod_base = OTHER; note = 2'-O-methylguanosine-3'-phosphate
  modified_base 14: mod_base = OTHER; note = 2'-deoxy-2'-fluorocytidine-3'-phosphate
  modified_base 15: mod_base = OTHER; note = 2'-O-methyladenosine-3'-phosphate
  modified_base 16: mod_base = OTHER; note = 2'-deoxy-2'-fluoroguanosine-3'-phosphate
  modified_base 17: mod_base = OTHER; note = 2'-O-methyluridine-3'-phosphate
  modified_base 18: mod_base = OTHER; note = 2'-O-methylcytidine-3'-phosphate
  modified_base 19: mod_base = OTHER; note = 2'-O-methylcytidine-3'-phosphate
  modified_base 20: mod_base = OTHER; note = 2'-O-methylguanosine-3'-phosphate
  modified_base 21: mod_base = OTHER; note = 2'-O-methylguanosine-3'-phosphorothioate
  modified_base 22: mod_base = OTHER; note = 2'-O-methyladenosine-3'-phosphorothioate
  modified_base 23: mod_base = OTHER; note = 2'-O-methylcytidine
atcctccatctcgcagtccggac

SEQ ID NO: 1100 - RNA, 23 nt, synthetic construct
  source 1..23: mol_type = other RNA
  modified_base 1: mod_base = OTHER; note = 2'-O-methyladenosine-3'-phosphorothioate
  modified_base 2: mod_base = OTHER; note = 2'-deoxy-2'-fluoroadenosine-3'-phosphorothioate
  modified_base 3: mod_base = OTHER; note = 2'-O-methylcytidine-3'-phosphate
  modified_base 4: mod_base = OTHER; note = 2'-O-methyladenosine-3'-phosphate
  modified_base 5: mod_base = OTHER; note = 2'-O-methylguanosine-3'-phosphate
  modified_base 6: mod_base = OTHER; note = 2'-deoxy-2'-fluoroadenosine-3'-phosphate
  modified_base 7: mod_base = OTHER; note = 2'-O-methyluridine-3'-phosphate
  modified_base 8: mod_base = OTHER; note = 2'-deoxy-2'-fluoroadenosine-3'-phosphate
  modified_base 9: mod_base = OTHER; note = 2'-deoxy-2'-fluoroadenosine-3'-phosphate
  modified_base 10: mod_base = OTHER; note = 2'-O-methylguanosine-3'-phosphate
  modified_base 11: mod_base = OTHER; note = 2'-O-methylcytidine-3'-phosphate
  modified_base 12: mod_base = OTHER; note = 2'-O-methylcytidine-3'-phosphate
  modified_base 13: mod_base = OTHER; note = 2'-O-methyluridine-3'-phosphate
  modified_base 14: mod_base = OTHER; note = 2'-deoxy-2'-fluoroguanosine-3'-phosphate
  modified_base 15: mod_base = OTHER; note = 2'-O-methylcytidine-3'-phosphate
  modified_base 16: mod_base = OTHER; note = 2'-deoxy-2'-fluorocytidine-3'-phosphate
  modified_base 17: mod_base = OTHER; note = 2'-O-methylguanosine-3'-phosphate
  modified_base 18: mod_base = OTHER; note = 2'-O-methylguanosine-3'-phosphate
  modified_base 19: mod_base = OTHER; note = 2'-O-methylguanosine-3'-phosphate
  modified_base 20: mod_base = OTHER; note = 2'-O-methyluridine-3'-phosphate
  modified_base 21: mod_base = OTHER; note = 2'-O-methylguanosine-3'-phosphorothioate
  modified_base 22: mod_base = OTHER; note = 2'-O-methylguanosine-3'-phosphorothioate
  modified_base 23: mod_base = OTHER; note = 2'-O-methylcytidine
aacagataagcctgccgggtggc

SEQ ID NO: 1101 - RNA, 23 nt, synthetic construct
  source 1..23: mol_type = other RNA
  modified_base 1: mod_base = OTHER; note = 2'-O-methyladenosine-3'-phosphorothioate
  modified_base 2: mod_base = OTHER; note = 2'-deoxy-2'-fluorocytidine-3'-phosphorothioate
  modified_base 3: mod_base = OTHER; note = 2'-O-methylcytidine-3'-phosphate
  modified_base 4: mod_base = OTHER; note = 2'-O-methyladenosine-3'-phosphate
  modified_base 5: mod_base = OTHER; note = 2'-O-methyladenosine-3'-phosphate
  modified_base 6: mod_base = OTHER; note = 2'-deoxy-2'-fluoroguanosine-3'-phosphate
  modified_base 7: mod_base = OTHER; note = 2'-O-methyladenosine-3'-phosphate
  modified_base 8: mod_base = OTHER; note = 2'-deoxy-2'-fluorocytidine-3'-phosphate
  modified_base 9: mod_base = OTHER; note = 2'-deoxy-2'-fluoroadenosine-3'-phosphate
  modified_base 10: mod_base = OTHER; note = 2'-O-methylguanosine-3'-phosphate
  modified_base 11: mod_base = OTHER; note = 2'-O-methyladenosine-3'-phosphate
  modified_base 12: mod_base = OTHER; note = 2'-O-methyluridine-3'-phosphate
  modified_base 13: mod_base = OTHER; note = 2'-O-methyladenosine-3'-phosphate
  modified_base 14: mod_base = OTHER; note = 2'-deoxy-2'-fluoroadenosine-3'-phosphate
  modified_base 15: mod_base = OTHER; note = 2'-O-methylguanosine-3'-phosphate
  modified_base 16: mod_base = OTHER; note = 2'-deoxy-2'-fluorocytidine-3'-phosphate
  modified_base 17: mod_base = OTHER; note = 2'-O-methylcytidine-3'-phosphate
  modified_base 18: mod_base = OTHER; note = 2'-O-methyluridine-3'-phosphate
  modified_base 19: mod_base = OTHER; note = 2'-O-methylguanosine-3'-phosphate
  modified_base 20: mod_base = OTHER; note = 2'-O-methylcytidine-3'-phosphate
  modified_base 21: mod_base = OTHER; note = 2'-O-methylcytidine-3'-phosphorothioate
  modified_base 22: mod_base = OTHER; note = 2'-O-methylguanosine-3'-phosphorothioate
  modified_base 23: mod_base = OTHER; note = 2'-O-methylguanosine
accaagacagataagcctgccgg

SEQ ID NO: 1102 - RNA, 23 nt, synthetic construct
  source 1..23: mol_type = other RNA
  modified_base 1: mod_base = OTHER; note = 2'-O-methyladenosine-3'-phosphorothioate
  modified_base 2: mod_base = OTHER; note = 2'-deoxy-2'-fluoroadenosine-3'-phosphorothioate
  modified_base 3: mod_base = OTHER; note = 2'-O-methyladenosine-3'-phosphate
  modified_base 4: mod_base = OTHER; note = 2'-O-methyladenosine-3'-phosphate
  modified_base 5: mod_base = OTHER; note = 2'-O-methyladenosine-3'-phosphate
  modified_base 6: mod_base = OTHER; note = 2'-deoxy-2'-fluoroguanosine-3'-phosphate
  modified_base 7: mod_base = OTHER; note = 2'-O-methyladenosine-3'-phosphate
  modified_base 8: mod_base = OTHER; note = 2'-deoxy-2'-fluoroguanosine-3'-phosphate
  modified_base 9: mod_base = OTHER; note = 2'-deoxy-2'-fluoroguanosine-3'-phosphate
  modified_base 10: mod_base = OTHER; note = 2'-O-methylcytidine-3'-phosphate
  modified_base 11: mod_base = OTHER; note = 2'-O-methylcytidine-3'-phosphate
  modified_base 12: mod_base = OTHER; note = 2'-O-methylcytidine-3'-phosphate
  modified_base 13: mod_base = OTHER; note = 2'-O-methyladenosine-3'-phosphate
  modified_base 14: mod_base = OTHER; note = 2'-deoxy-2'-fluoroadenosine-3'-phosphate
  modified_base 15: mod_base = OTHER; note = 2'-O-methylguanosine-3'-phosphate
  modified_base 16: mod_base = OTHER; note = 2'-deoxy-2'-fluoroadenosine-3'-phosphate
  modified_base 17: mod_base = OTHER; note = 2'-O-methylcytidine-3'-phosphate
  modified_base 18: mod_base = OTHER; note = 2'-O-methyladenosine-3'-phosphate
  modified_base 19: mod_base = OTHER; note = 2'-O-methylguanosine-3'-phosphate
  modified_base 20: mod_base = OTHER; note = 2'-O-methyladenosine-3'-phosphate
  modified_base 21: mod_base = OTHER; note = 2'-O-methyluridine-3'-phosphorothioate
  modified_base 22: mod_base = OTHER; note = 2'-O-methyladenosine-3'-phosphorothioate
  modified_base 23: mod_base = OTHER; note = 2'-O-methyladenosine
aaaaagaggcccaagacagataa

SEQ ID NO: 1103 - RNA, 23 nt, synthetic construct
  source 1..23: mol_type = other RNA
  modified_base 1: mod_base = OTHER; note = 2'-O-methyladenosine-3'-phosphorothioate
  modified_base 2: mod_base = OTHER; note = 2'-deoxy-2'-fluoroguanosine-3'-phosphorothioate
  modified_base 3: mod_base = OTHER; note = 2'-O-methyluridine-3'-phosphate
  modified_base 4: mod_base = OTHER; note = 2'-O-methylguanosine-3'-phosphate
  modified_base 5: mod_base = OTHER; note = 2'-O-methyladenosine-3'-phosphate
  modified_base 6: mod_base = OTHER; note = 2'-deoxy-2'-fluorocytidine-3'-phosphate
  modified_base 7: mod_base = OTHER; note = 2'-O-methyladenosine-3'-phosphate
  modified_base 8: mod_base = OTHER; note = 2'-deoxy-2'-fluoroadenosine-3'-phosphate
  modified_base 9: mod_base = OTHER; note = 2'-deoxy-2'-fluoroadenosine-3'-phosphate
  modified_base 10: mod_base = OTHER; note = 2'-O-methyladenosine-3'-phosphate
  modified_base 11: mod_base = OTHER; note = 2'-O-methylguanosine-3'-phosphate
  modified_base 12: mod_base = OTHER; note = 2'-O-methyladenosine-3'-phosphate
  modified_base 13: mod_base = OTHER; note = 2'-O-methylguanosine-3'-phosphate
  modified_base 14: mod_base = OTHER; note = 2'-deoxy-2'-fluoroguanosine-3'-phosphate
  modified_base 15: mod_base = OTHER; note = 2'-O-methylcytidine-3'-phosphate
  modified_base 16: mod_base = OTHER; note = 2'-deoxy-2'-fluorocytidine-3'-phosphate
  modified_base 17: mod_base = OTHER; note = 2'-O-methylcytidine-3'-phosphate
  modified_base 18: mod_base = OTHER; note = 2'-O-methyladenosine-3'-phosphate
  modified_base 19: mod_base = OTHER; note = 2'-O-methyladenosine-3'-phosphate
  modified_base 20: mod_base = OTHER; note = 2'-O-methylguanosine-3'-phosphate
  modified_base 21: mod_base = OTHER; note = 2'-O-methyladenosine-3'-phosphorothioate
  modified_base 22: mod_base = OTHER; note = 2'-O-methylcytidine-3'-phosphorothioate
  modified_base 23: mod_base = OTHER; note = 2'-O-methyladenosine
agtgacaaaagaggcccaagaca

SEQ ID NO: 1104 - RNA, 23 nt, synthetic construct
  source 1..23: mol_type = other RNA
  modified_base 1: mod_base = OTHER; note = 2'-O-methyladenosine-3'-phosphorothioate
  modified_base 2: mod_base = OTHER; note = 2'-deoxy-2'-fluoroadenosine-3'-phosphorothioate
  modified_base 3: mod_base = OTHER; note = 2'-O-methyladenosine-3'-phosphate
  modified_base 4: mod_base = OTHER; note = 2'-O-methyluridine-3'-phosphate
  modified_base 5: mod_base = OTHER; note = 2'-O-methyladenosine-3'-phosphate
  modified_base 6: mod_base = OTHER; note = 2'-deoxy-2'-fluorouridine-3'-phosphate
  modified_base 7: mod_base = OTHER; note = 2'-O-methylguanosine-3'-phosphate
  modified_base 8: mod_base = OTHER; note = 2'-deoxy-2'-fluorouridine-3'-phosphate
  modified_base 9: mod_base = OTHER; note = 2'-deoxy-2'-fluoroguanosine-3'-phosphate
  modified_base 10: mod_base = OTHER; note = 2'-O-methyladenosine-3'-phosphate
  modified_base 11: mod_base = OTHER; note = 2'-O-methylcytidine-3'-phosphate
  modified_base 12: mod_base = OTHER; note = 2'-O-methyladenosine-3'-phosphate
  modified_base 13: mod_base = OTHER; note = 2'-O-methyladenosine-3'-phosphate
  modified_base 14: mod_base = OTHER; note = 2'-deoxy-2'-fluoroadenosine-3'-phosphate
  modified_base 15: mod_base = OTHER; note = 2'-O-methyladenosine-3'-phosphate
  modified_base 16: mod_base = OTHER; note = 2'-deoxy-2'-fluoroguanosine-3'-phosphate
  modified_base 17: mod_base = OTHER; note = 2'-O-methyladenosine-3'-phosphate
  modified_base 18: mod_base = OTHER; note = 2'-O-methylguanosine-3'-phosphate
  modified_base 19: mod_base = OTHER; note = 2'-O-methylguanosine-3'-phosphate
  modified_base 20: mod_base = OTHER; note = 2'-O-methylcytidine-3'-phosphate
  modified_base 21: mod_base = OTHER; note = 2'-O-methylcytidine-3'-phosphorothioate
  modified_base 22: mod_base = OTHER; note = 2'-O-methylcytidine-3'-phosphorothioate
  modified_base 23: mod_base = OTHER; note = 2'-O-methyladenosine
aaatatgtgacaaaagaggccca

SEQ ID NO: 1105 - RNA, 23 nt, synthetic construct
  source 1..23: mol_type = other RNA
  modified_base 1: mod_base = OTHER; note = 2'-O-methyladenosine-3'-phosphorothioate
  modified_base 2: mod_base = OTHER; note = 2'-deoxy-2'-fluoroadenosine-3'-phosphorothioate
  modified_base 3: mod_base = OTHER; note = 2'-O-methyluridine-3'-phosphate
  modified_base 4: mod_base = OTHER; note = 2'-O-methylguanosine-3'-phosphate
  modified_base 5: mod_base = OTHER; note = 2'-O-methyladenosine-3'-phosphate
  modified_base 6: mod_base = OTHER; note = 2'-deoxy-2'-fluoroguanosine-3'-phosphate
  modified_base 7: mod_base = OTHER; note = 2'-O-methylcytidine-3'-phosphate
  modified_base 8: mod_base = OTHER; note = 2'-deoxy-2'-fluoroadenosine-3'-phosphate
  modified_base 9: mod_base = OTHER; note = 2'-deoxy-2'-fluoroadenosine-3'-phosphate
  modified_base 10: mod_base = OTHER; note = 2'-O-methyluridine-3'-phosphate
  modified_base 11: mod_base = OTHER; note = 2'-O-methyladenosine-3'-phosphate
  modified_base 12: mod_base = OTHER; note = 2'-O-methyluridine-3'-phosphate
  modified_base 13: mod_base = OTHER; note = 2'-O-methylguanosine-3'-phosphate
  modified_base 14: mod_base = OTHER; note = 2'-deoxy-2'-fluorouridine-3'-phosphate
  modified_base 15: mod_base = OTHER; note = 2'-O-methylguanosine-3'-phosphate
  modified_base 16: mod_base = OTHER; note = 2'-deoxy-2'-fluoroadenosine-3'-phosphate
  modified_base 17: mod_base = OTHER; note = 2'-O-methylcytidine-3'-phosphate
  modified_base 18: mod_base = OTHER; note = 2'-O-methyladenosine-3'-phosphate
  modified_base 19: mod_base = OTHER; note = 2'-O-methyladenosine-3'-phosphate
  modified_base 20: mod_base = OTHER; note = 2'-O-methyladenosine-3'-phosphate
  modified_base 21: mod_base = OTHER; note = 2'-O-methyladenosine-3'-phosphorothioate
  modified_base 22: mod_base = OTHER; note = 2'-O-methylguanosine-3'-phosphorothioate
  modified_base 23: mod_base = OTHER; note = 2'-O-methyladenosine
aatgagcaatatgtgacaaaaga

SEQ ID NO: 1106 - RNA, 23 nt, synthetic construct
  source 1..23: mol_type = other RNA
  modified_base 1: mod_base = OTHER; note = 2'-O-methyladenosine-3'-phosphorothioate
  modified_base 2: mod_base = OTHER; note = 2'-deoxy-2'-fluorouridine-3'-phosphorothioate
  modified_base 3: mod_base = OTHER; note = 2'-O-methylcytidine-3'-phosphate
  modified_base 4: mod_base = OTHER; note = 2'-O-methyladenosine-3'-phosphate
  modified_base 5: mod_base = OTHER; note = 2'-O-methylcytidine-3'-phosphate
  modified_base 6: mod_base = OTHER; note = 2'-deoxy-2'-fluoroadenosine-3'-phosphate
  modified_base 7: mod_base = OTHER; note = 2'-O-methylguanosine-3'-phosphate
  modified_base 8: mod_base = OTHER; note = 2'-deoxy-2'-fluoroadenosine-3'-phosphate
  modified_base 9: mod_base = OTHER; note = 2'-deoxy-2'-fluorouridine-3'-phosphate
  modified_base 10: mod_base = OTHER; note = 2'-O-methylguanosine-3'-phosphate
  modified_base 11: mod_base = OTHER; note = 2'-O-methyladenosine-3'-phosphate
  modified_base 12: mod_base = OTHER; note = 2'-O-methylguanosine-3'-phosphate
  modified_base 13: mod_base = OTHER; note = 2'-O-methylcytidine-3'-phosphate
  modified_base 14: mod_base = OTHER; note = 2'-deoxy-2'-fluoroadenosine-3'-phosphate
  modified_base 15: mod_base = OTHER; note = 2'-O-methyladenosine-3'-phosphate
  modified_base 16: mod_base = OTHER; note = 2'-deoxy-2'-fluorouridine-3'-phosphate
  modified_base 17: mod_base = OTHER; note = 2'-O-methyladenosine-3'-phosphate
  modified_base 18: mod_base = OTHER; note = 2'-O-methyluridine-3'-phosphate
  modified_base 19: mod_base = OTHER; note = 2'-O-methylguanosine-3'-phosphate
  modified_base 20: mod_base = OTHER; note = 2'-O-methyluridine-3'-phosphate
  modified_base 21: mod_base = OTHER; note = 2'-O-methylguanosine-3'-phosphorothioate
  modified_base 22: mod_base = OTHER; note = 2'-O-methyladenosine-3'-phosphorothioate
  modified_base 23: mod_base = OTHER; note = 2'-O-methylcytidine
atcacagatgagcaatatgtgac

SEQ ID NO: 1107 - RNA, 23 nt, synthetic construct
  source 1..23: mol_type = other RNA
  modified_base 1: mod_base = OTHER; note = 2'-O-methyladenosine-3'-phosphorothioate
  modified_base 2: mod_base = OTHER; note = 2'-deoxy-2'-fluorouridine-3'-phosphorothioate
  modified_base 3: mod_base = OTHER; note = 2'-O-methylcytidine-3'-phosphate
  modified_base 4: mod_base = OTHER; note = 2'-O-methyladenosine-3'-phosphate
  modified_base 5: mod_base = OTHER; note = 2'-O-methylguanosine-3'-phosphate
  modified_base 6: mod_base = OTHER; note = 2'-deoxy-2'-fluorocytidine-3'-phosphate
  modified_base 7: mod_base = OTHER; note = 2'-O-methyluridine-3'-phosphate
  modified_base 8: mod_base = OTHER; note = 2'-deoxy-2'-fluorocytidine-3'-phosphate
  modified_base 9: mod_base = OTHER; note = 2'-deoxy-2'-fluoroadenosine-3'-phosphate
  modified_base 10: mod_base = OTHER; note = 2'-O-methylcytidine-3'-phosphate
  modified_base 11: mod_base = OTHER; note = 2'-O-methyladenosine-3'-phosphate
  modified_base 12: mod_base = OTHER; note = 2'-O-methylguanosine-3'-phosphate
  modified_base 13: mod_base = OTHER; note = 2'-O-methyladenosine-3'-phosphate
  modified_base 14: mod_base = OTHER; note = 2'-deoxy-2'-fluorouridine-3'-phosphate
  modified_base 15: mod_base = OTHER; note = 2'-O-methylguanosine-3'-phosphate
  modified_base 16: mod_base = OTHER; note = 2'-deoxy-2'-fluoroadenosine-3'-phosphate
  modified_base 17: mod_base = OTHER; note = 2'-O-methylguanosine-3'-phosphate
  modified_base 18: mod_base = OTHER; note = 2'-O-methylcytidine-3'-phosphate
  modified_base 19: mod_base = OTHER; note = 2'-O-methyladenosine-3'-phosphate
  modified_base 20: mod_base = OTHER; note = 2'-O-methyladenosine-3'-phosphate
  modified_base 21: mod_base = OTHER; note = 2'-O-methyluridine-3'-phosphorothioate
  modified_base 22: mod_base = OTHER; note = 2'-O-methyladenosine-3'-phosphorothioate
  modified_base 23: mod_base = OTHER; note = 2'-O-methyluridine
atcagctcacagatgagcaatat

SEQ ID NO: 1108 - RNA, 23 nt, synthetic construct
  source 1..23: mol_type = other RNA
  modified_base 1: mod_base = OTHER; note = 2'-O-methyladenosine-3'-phosphorothioate
  modified_base 2: mod_base = OTHER; note = 2'-deoxy-2'-fluoroadenosine-3'-phosphorothioate
  modified_base 3: mod_base = OTHER; note = 2'-O-methylguanosine-3'-phosphate
  modified_base 4: mod_base = OTHER; note = 2'-O-methylguanosine-3'-phosphate
  modified_base 5: mod_base = OTHER; note = 2'-O-methylguanosine-3'-phosphate
  modified_base 6: mod_base = OTHER; note = 2'-deoxy-2'-fluorocytidine-3'-phosphate
  modified_base 7: mod_base = OTHER; note = 2'-O-methylcytidine-3'-phosphate
  modified_base 8: mod_base = OTHER; note = 2'-deoxy-2'-fluorouridine-3'-phosphate
  modified_base 9: mod_base = OTHER; note = 2'-deoxy-2'-fluorocytidine-3'-phosphate
  modified_base 10: mod_base = OTHER; note = 2'-O-methyladenosine-3'-phosphate
  modified_base 11: mod_base = OTHER; note = 2'-O-methylguanosine-3'-phosphate
  modified_base 12: mod_base = OTHER; note = 2'-O-methylcytidine-3'-phosphate
  modified_base 13: mod_base = OTHER; note = 2'-O-methyluridine-3'-phosphate
  modified_base 14: mod_base = OTHER; note = 2'-deoxy-2'-fluorocytidine-3'-phosphate
  modified_base 15: mod_base = OTHER; note = 2'-O-methyladenosine-3'-phosphate
  modified_base 16: mod_base = OTHER; note = 2'-deoxy-2'-fluorocytidine-3'-phosphate
  modified_base 17: mod_base = OTHER; note = 2'-O-methyladenosine-3'-phosphate
  modified_base 18: mod_base = OTHER; note = 2'-O-methylguanosine-3'-phosphate
  modified_base 19: mod_base = OTHER; note = 2'-O-methyladenosine-3'-phosphate
  modified_base 20: mod_base = OTHER; note = 2'-O-methyluridine-3'-phosphate
  modified_base 21: mod_base = OTHER; note = 2'-O-methylguanosine-3'-phosphorothioate
  modified_base 22: mod_base = OTHER; note = 2'-O-methyladenosine-3'-phosphorothioate
  modified_base 23: mod_base = OTHER; note = 2'-O-methylguanosine
aagggcctcagctcacagatgag

SEQ ID NO: 1109 - RNA, 23 nt, synthetic construct
  source 1..23: mol_type = other RNA
  modified_base 1: mod_base = OTHER; note = 2'-O-methyladenosine-3'-phosphorothioate
  modified_base 2: mod_base = OTHER; note = 2'-deoxy-2'-fluoroadenosine-3'-phosphorothioate
  modified_base 3: mod_base = OTHER; note = 2'-O-methyluridine-3'-phosphate
  modified_base 4: mod_base = OTHER; note = 2'-O-methyladenosine-3'-phosphate
  modified_base 5: mod_base = OTHER; note = 2'-O-methylcytidine-3'-phosphate
  modified_base 6: mod_base = OTHER; note = 2'-deoxy-2'-fluorouridine-3'-phosphate
  modified_base 7: mod_base = OTHER; note = 2'-O-methylcytidine-3'-phosphate
  modified_base 8: mod_base = OTHER; note = 2'-deoxy-2'-fluoroadenosine-3'-phosphate
  modified_base 9: mod_base = OTHER; note = 2'-deoxy-2'-fluoroguanosine-3'-phosphate
  modified_base 10: mod_base = OTHER; note = 2'-O-methyluridine-3'-phosphate
  modified_base 11: mod_base = OTHER; note = 2'-O-methylguanosine-3'-phosphate
  modified_base 12: mod_base = OTHER; note = 2'-O-methyladenosine-3'-phosphate
  modified_base 13: mod_base = OTHER; note = 2'-O-methylguanosine-3'-phosphate
  modified_base 14: mod_base = OTHER; note = 2'-deoxy-2'-fluorouridine-3'-phosphate
  modified_base 15: mod_base = OTHER; note = 2'-O-methylcytidine-3'-phosphate
  modified_base 16: mod_base = OTHER; note = 2'-deoxy-2'-fluoroadenosine-3'-phosphate
  modified_base 17: mod_base = OTHER; note = 2'-O-methylguanosine-3'-phosphate
  modified_base 18: mod_base = OTHER; note = 2'-O-methylguanosine-3'-phosphate
  modified_base 19: mod_base = OTHER; note = 2'-O-methylguanosine-3'-phosphate
  modified_base 20: mod_base = OTHER; note = 2'-O-methylcytidine-3'-phosphate
  modified_base 21: mod_base = OTHER; note = 2'-O-methylcytidine-3'-phosphorothioate
  modified_base 22: mod_base = OTHER; note = 2'-O-methyluridine-3'-phosphorothioate
  modified_base 23: mod_base = OTHER; note = 2'-O-methylcytidine
aatactcagtgagtcagggcctc

SEQ ID NO: 1110 - RNA, 23 nt, synthetic construct
  source 1..23: mol_type = other RNA
  modified_base 1: mod_base = OTHER; note = 2'-O-methyladenosine-3'-phosphorothioate
  modified_base 2: mod_base = OTHER; note = 2'-deoxy-2'-fluorocytidine-3'-phosphorothioate
  modified_base 3: mod_base = OTHER; note = 2'-O-methyladenosine-3'-phosphate
  modified_base 4: mod_base = OTHER; note = 2'-O-methyladenosine-3'-phosphate
  modified_base 5: mod_base = OTHER; note = 2'-O-methyladenosine-3'-phosphate
  modified_base 6: mod_base = OTHER; note = 2'-deoxy-2'-fluoroadenosine-3'-phosphate
  modified_base 7: mod_base = OTHER; note = 2'-O-methyladenosine-3'-phosphate
  modified_base 8: mod_base = OTHER; note = 2'-deoxy-2'-fluorouridine-3'-phosphate
  modified_base 9: mod_base = OTHER; note = 2'-deoxy-2'-fluoroadenosine-3'-phosphate
  modified_base 10: mod_base = OTHER; note = 2'-O-methylcytidine-3'-phosphate
  modified_base 11: mod_base = OTHER; note = 2'-O-methyluridine-3'-phosphate
  modified_base 12: mod_base = OTHER; note = 2'-O-methylcytidine-3'-phosphate
  modified_base 13: mod_base = OTHER; note = 2'-O-methyladenosine-3'-phosphate
  modified_base 14: mod_base = OTHER; note = 2'-deoxy-2'-fluoroguanosine-3'-phosphate
  modified_base 15: mod_base = OTHER; note = 2'-O-methyluridine-3'-phosphate
  modified_base 16: mod_base = OTHER; note = 2'-deoxy-2'-fluoroguanosine-3'-phosphate
  modified_base 17: mod_base = OTHER; note = 2'-O-methyladenosine-3'-phosphate
  modified_base 18: mod_base = OTHER; note = 2'-O-methylguanosine-3'-phosphate
  modified_base 19: mod_base = OTHER; note = 2'-O-methyluridine-3'-phosphate
  modified_base 20: mod_base = OTHER; note = 2'-O-methylcytidine-3'-phosphate
  modified_base 21: mod_base = OTHER; note = 2'-O-methyladenosine-3'-phosphorothioate
  modified_base 22: mod_base = OTHER; note = 2'-O-methylguanosine-3'-phosphorothioate
  modified_base 23: mod_base = OTHER; note = 2'-O-methylguanosine
acaaaaatactcagtgagtcagg

SEQ ID NO: 1111 - RNA, 23 nt, synthetic construct
  source 1..23: mol_type = other RNA
  modified_base 1: mod_base = OTHER; note = 2'-O-methyladenosine-3'-phosphorothioate
  modified_base 2: mod_base = OTHER; note = 2'-deoxy-2'-fluoroadenosine-3'-phosphorothioate
  modified_base 3: mod_base = OTHER; note = 2'-O-methyladenosine-3'-phosphate
  modified_base 4: mod_base = OTHER; note = 2'-O-methyluridine-3'-phosphate
  modified_base 5: mod_base = OTHER; note = 2'-O-methylguanosine-3'-phosphate
  modified_base 6: mod_base = OTHER; note = 2'-deoxy-2'-fluorouridine-3'-phosphate
  modified_base 7: mod_base = OTHER; note = 2'-O-methylcytidine-3'-phosphate
  modified_base 8: mod_base = OTHER; note = 2'-deoxy-2'-fluorouridine-3'-phosphate
  modified_base 9: mod_base = OTHER; note = 2'-deoxy-2'-fluorocytidine-3'-phosphate
  modified_base 10: mod_base = OTHER; note = 2'-O-methylcytidine-3'-phosphate
  modified_base 11: mod_base = OTHER; note = 2'-O-methyluridine-3'-phosphate
  modified_base 12: mod_base = OTHER; note = 2'-O-methyluridine-3'-phosphate
  modified_base 13: mod_base = OTHER; note = 2'-O-methylcytidine-3'-phosphate
  modified_base 14: mod_base = OTHER; note = 2'-deoxy-2'-fluorouridine-3'-phosphate
  modified_base 15: mod_base = OTHER; note = 2'-O-methyluridine-3'-phosphate
  modified_base 16: mod_base = OTHER; note = 2'-deoxy-2'-fluorocytidine-3'-phosphate
  modified_base 17: mod_base = OTHER; note = 2'-O-methyluridine-3'-phosphate
  modified_base 18: mod_base = OTHER; note = 2'-O-methylguanosine-3'-phosphate
  modified_base 19: mod_base = OTHER; note = 2'-O-methylcytidine-3'-phosphate
  modified_base 20: mod_base = OTHER; note = 2'-O-methyluridine-3'-phosphate
  modified_base 21: mod_base = OTHER; note = 2'-O-methylcytidine-3'-phosphorothioate
  modified_base 22: mod_base = OTHER; note = 2'-O-methylcytidine-3'-phosphorothioate
  modified_base 23: mod_base = OTHER; note = 2'-O-methylcytidine
aaatgtctccttcttctgctccc

SEQ ID NO: 1112 - RNA, 23 nt, synthetic construct
  source 1..23: mol_type = other RNA
  modified_base 1: mod_base = OTHER; note = 2'-O-methyladenosine-3'-phosphorothioate
  modified_base 2: mod_base = OTHER; note = 2'-deoxy-2'-fluoroadenosine-3'-phosphorothioate
  modified_base 3: mod_base = OTHER; note = 2'-O-methylguanosine-3'-phosphate
  modified_base 4: mod_base = OTHER; note = 2'-O-methyladenosine-3'-phosphate
  modified_base 5: mod_base = OTHER; note = 2'-O-methylguanosine-3'-phosphate
  modified_base 6: mod_base = OTHER; note = 2'-deoxy-2'-fluoroadenosine-3'-phosphate
  modified_base 7: mod_base = OTHER; note = 2'-O-methyladenosine-3'-phosphate
  modified_base 8: mod_base = OTHER; note = 2'-deoxy-2'-fluoroadenosine-3'-phosphate
  modified_base 9: mod_base = OTHER; note = 2'-deoxy-2'-fluorouridine-3'-phosphate
  modified_base 10: mod_base = OTHER; note = 2'-O-methylguanosine-3'-phosphate
  modified_base 11: mod_base = OTHER; note = 2'-O-methyluridine-3'-phosphate
  modified_base 12: mod_base = OTHER; note = 2'-O-methylcytidine-3'-phosphate
  modified_base 13: mod_base = OTHER; note = 2'-O-methyluridine-3'-phosphate
  modified_base 14: mod_base = OTHER; note = 2'-deoxy-2'-fluorocytidine-3'-phosphate
  modified_base 15: mod_base = OTHER; note = 2'-O-methylcytidine-3'-phosphate
  modified_base 16: mod_base = OTHER; note = 2'-deoxy-2'-fluorouridine-3'-phosphate
  modified_base 17: mod_base = OTHER; note = 2'-O-methyluridine-3'-phosphate
  modified_base 18: mod_base = OTHER; note = 2'-O-methylcytidine-3'-phosphate
  modified_base 19: mod_base = OTHER; note = 2'-O-methyluridine-3'-phosphate
  modified_base 20: mod_base = OTHER; note = 2'-O-methyluridine-3'-phosphate
  modified_base 21: mod_base = OTHER; note = 2'-O-methylcytidine-3'-phosphorothioate
  modified_base 22: mod_base = OTHER; note = 2'-O-methyluridine-3'-phosphorothioate
  modified_base 23: mod_base = OTHER; note = 2'-O-methylguanosine
aagagaaatgtctccttcttctg

SEQ ID NO: 1113 - RNA, 23 nt, synthetic construct
  source 1..23: mol_type = other RNA
  modified_base 1: mod_base = OTHER; note = 2'-O-methyladenosine-3'-phosphorothioate
  modified_base 2: mod_base = OTHER; note = 2'-deoxy-2'-fluorouridine-3'-phosphorothioate
  modified_base 3: mod_base = OTHER; note = 2'-O-methyluridine-3'-phosphate
  modified_base 4: mod_base = OTHER; note = 2'-O-methyluridine-3'-phosphate
  modified_base 5: mod_base = OTHER; note = 2'-O-methylcytidine-3'-phosphate
  modified_base 6: mod_base = OTHER; note = 2'-deoxy-2'-fluoroguanosine-3'-phosphate
  modified_base 7: mod_base = OTHER; note = 2'-O-methylguanosine-3'-phosphate
  modified_base 8: mod_base = OTHER; note = 2'-deoxy-2'-fluoroadenosine-3'-phosphate
  modified_base 9: mod_base = OTHER; note = 2'-deoxy-2'-fluoroguanosine-3'-phosphate
  modified_base 10: mod_base = OTHER; note = 2'-O-methyladenosine-3'-phosphate
  modified_base 11: mod_base = OTHER; note = 2'-O-methylguanosine-3'-phosphate
  modified_base 12: mod_base = OTHER; note = 2'-O-methyladenosine-3'-phosphate
  modified_base 13: mod_base = OTHER; note = 2'-O-methyladenosine-3'-phosphate
  modified_base 14: mod_base = OTHER; note = 2'-deoxy-2'-fluoroadenosine-3'-phosphate
  modified_base 15: mod_base = OTHER; note = 2'-O-methyluridine-3'-phosphate
  modified_base 16: mod_base = OTHER; note = 2'-deoxy-2'-fluoroguanosine-3'-phosphate
  modified_base 17: mod_base = OTHER; note = 2'-O-methyluridine-3'-phosphate
  modified_base 18: mod_base = OTHER; note = 2'-O-methylcytidine-3'-phosphate
  modified_base 19: mod_base = OTHER; note = 2'-O-methyluridine-3'-phosphate
  modified_base 20: mod_base = OTHER; note = 2'-O-methylcytidine-3'-phosphate
  modified_base 21: mod_base = OTHER; note = 2'-O-methylcytidine-3'-phosphorothioate
  modified_base 22: mod_base = OTHER; note = 2'-O-methyluridine-3'-phosphorothioate
  modified_base 23: mod_base = OTHER; note = 2'-O-methyluridine
atttcggagagaaatgtctcctt

SEQ ID NO: 1114 - RNA, 23 nt, synthetic construct
  source 1..23: mol_type = other RNA
  modified_base 1: mod_base = OTHER; note = 2'-O-methyladenosine-3'-phosphorothioate
  modified_base 2: mod_base = OTHER; note = 2'-deoxy-2'-fluoroadenosine-3'-phosphorothioate
  modified_base 3: mod_base = OTHER; note = 2'-O-methylguanosine-3'-phosphate
  modified_base 4: mod_base = OTHER; note = 2'-O-methyluridine-3'-phosphate
  modified_base 5: mod_base = OTHER; note = 2'-O-methyluridine-3'-phosphate
  modified_base 6: mod_base = OTHER; note = 2'-deoxy-2'-fluorocytidine-3'-phosphate
  modified_base 7: mod_base = OTHER; note = 2'-O-methyladenosine-3'-phosphate
  modified_base 8: mod_base = OTHER; note = 2'-deoxy-2'-fluorouridine-3'-phosphate
  modified_base 9: mod_base = OTHER; note = 2'-deoxy-2'-fluorouridine-3'-phosphate
  modified_base 10: mod_base = OTHER; note = 2'-O-methyluridine-3'-phosphate
  modified_base 11: mod_base = OTHER; note = 2'-O-methyluridine-3'-phosphate
  modified_base 12: mod_base = OTHER; note = 2'-O-methylcytidine-3'-phosphate
  modified_base 13: mod_base = OTHER; note = 2'-O-methylguanosine-3'-phosphate
  modified_base 14: mod_base = OTHER; note = 2'-deoxy-2'-fluoroguanosine-3'-phosphate
  modified_base 15: mod_base = OTHER; note = 2'-O-methyladenosine-3'-phosphate
  modified_base 16: mod_base = OTHER; note = 2'-deoxy-2'-fluoroguanosine-3'-phosphate
  modified_base 17: mod_base = OTHER; note = 2'-O-methyladenosine-3'-phosphate
  modified_base 18: mod_base = OTHER; note = 2'-O-methylguanosine-3'-phosphate
  modified_base 19: mod_base = OTHER; note = 2'-O-methyladenosine-3'-phosphate
  modified_base 20: mod_base = OTHER; note = 2'-O-methyladenosine-3'-phosphate
  modified_base 21: mod_base = OTHER; note = 2'-O-methyladenosine-3'-phosphorothioate
  modified_base 22: mod_base = OTHER; note = 2'-O-methyluridine-3'-phosphorothioate
  modified_base 23: mod_base = OTHER; note = 2'-O-methylguanosine
aagttcattttcggagagaaatg

SEQ ID NO: 1115 - RNA, 23 nt, synthetic construct
  source 1..23: mol_type = other RNA
  modified_base 1: mod_base = OTHER; note = 2'-O-methyladenosine-3'-phosphorothioate
  modified_base 2: mod_base = OTHER; note = 2'-deoxy-2'-fluorouridine-3'-phosphorothioate
  modified_base 3: mod_base = OTHER; note = 2'-O-methylguanosine-3'-phosphate
  modified_base 4: mod_base = OTHER; note = 2'-O-methyluridine-3'-phosphate
  modified_base 5: mod_base = OTHER; note = 2'-O-methyluridine-3'-phosphate
  modified_base 6: mod_base = OTHER; note = 2'-deoxy-2'-fluoroguanosine-3'-phosphate
  modified_base 7: mod_base = OTHER; note = 2'-O-methyladenosine-3'-phosphate
  modified_base 8: mod_base = OTHER; note = 2'-deoxy-2'-fluoroguanosine-3'-phosphate
  modified_base 9: mod_base = OTHER; note = 2'-deoxy-2'-fluorouridine-3'-phosphate
  modified_base 10: mod_base = OTHER; note = 2'-O-methyluridine-3'-phosphate
  modified_base 11: mod_base = OTHER; note = 2'-O-methylcytidine-3'-phosphate
  modified_base 12: mod_base = OTHER; note = 2'-O-methyladenosine-3'-phosphate
  modified_base 13: mod_base = OTHER; note = 2'-O-methyluridine-3'-phosphate
  modified_base 14: mod_base = OTHER; note = 2'-deoxy-2'-fluorouridine-3'-phosphate
  modified_base 15: mod_base = OTHER; note = 2'-O-methyluridine-3'-phosphate
  modified_base 16: mod_base = OTHER; note = 2'-deoxy-2'-fluorouridine-3'-phosphate
  modified_base 17: mod_base = OTHER; note = 2'-O-methylcytidine-3'-phosphate
  modified_base 18: mod_base = OTHER; note = 2'-O-methylguanosine-3'-phosphate
  modified_base 19: mod_base = OTHER; note = 2'-O-methylguanosine-3'-phosphate
  modified_base 20: mod_base = OTHER; note = 2'-O-methyladenosine-3'-phosphate
  modified_base 21: mod_base = OTHER; note = 2'-O-methylguanosine-3'-phosphorothioate
  modified_base 22: mod_base = OTHER; note = 2'-O-methyladenosine-3'-phosphorothioate
  modified_base 23: mod_base = OTHER; note = 2'-O-methylguanosine
atgttgagttcattttcggagag

SEQ ID NO: 1116 - RNA, 23 nt, synthetic construct
  source 1..23: mol_type = other RNA
  modified_base 1: mod_base = OTHER; note = 2'-O-methyladenosine-3'-phosphorothioate
  modified_base 2: mod_base = OTHER; note = 2'-deoxy-2'-fluorouridine-3'-phosphorothioate
  modified_base 3: mod_base = OTHER; note = 2'-O-methylguanosine-3'-phosphate
  modified_base 4: mod_base = OTHER; note = 2'-O-methylguanosine-3'-phosphate
  modified_base 5: mod_base = OTHER; note = 2'-O-methylcytidine-3'-phosphate
  modified_base 6: mod_base = OTHER; note = 2'-deoxy-2'-fluorocytidine-3'-phosphate
  modified_base 7: mod_base = OTHER; note = 2'-O-methyluridine-3'-phosphate
  modified_base 8: mod_base = OTHER; note = 2'-deoxy-2'-fluoroguanosine-3'-phosphate
  modified_base 9: mod_base = OTHER; note = 2'-deoxy-2'-fluorouridine-3'-phosphate
  modified_base 10: mod_base = OTHER; note = 2'-O-methyluridine-3'-phosphate
  modified_base 11: mod_base = OTHER; note = 2'-O-methylguanosine-3'-phosphate
  modified_base 12: mod_base = OTHER; note = 2'-O-methyladenosine-3'-phosphate
  modified_base 13: mod_base = OTHER; note = 2'-O-methylguanosine-3'-phosphate
  modified_base 14: mod_base = OTHER; note = 2'-deoxy-2'-fluorouridine-3'-phosphate
  modified_base 15: mod_base = OTHER; note = 2'-O-methyluridine-3'-phosphate
  modified_base 16: mod_base = OTHER; note = 2'-deoxy-2'-fluorocytidine-3'-phosphate
  modified_base 17: mod_base = OTHER; note = 2'-O-methyladenosine-3'-phosphate
  modified_base 18: mod_base = OTHER; note = 2'-O-methyluridine-3'-phosphate
  modified_base 19: mod_base = OTHER; note = 2'-O-methyluridine-3'-phosphate
  modified_base 20: mod_base = OTHER; note = 2'-O-methyluridine-3'-phosphate
  modified_base 21: mod_base = OTHER; note = 2'-O-methyluridine-3'-phosphorothioate
  modified_base 22: mod_base = OTHER; note = 2'-O-methylcytidine-3'-phosphorothioate
  modified_base 23: mod_base = OTHER; note = 2'-O-methylguanosine
atggcctgttgagttcattttcg

SEQ ID NO: 1117 - RNA, 23 nt, synthetic construct
  source 1..23: mol_type = other RNA
  modified_base 1: mod_base = OTHER; note = 2'-O-methyladenosine-3'-phosphorothioate
  modified_base 2: mod_base = OTHER; note = 2'-deoxy-2'-fluoroguanosine-3'-phosphorothioate
  modified_base 3: mod_base = OTHER; note = 2'-O-methyladenosine-3'-phosphate
  modified_base 4: mod_base = OTHER; note = 2'-O-methyladenosine-3'-phosphate
  modified_base 5: mod_base = OTHER; note = 2'-O-methylguanosine-3'-phosphate
  modified_base 6: mod_base = OTHER; note = 2'-deoxy-2'-fluoroguanosine-3'-phosphate
  modified_base 7: mod_base = OTHER; note = 2'-O-methyluridine-3'-phosphate
  modified_base 8: mod_base = OTHER; note = 2'-deoxy-2'-fluoroguanosine-3'-phosphate
  modified_base 9: mod_base = OTHER; note = 2'-deoxy-2'-fluoroguanosine-3'-phosphate
  modified_base 10: mod_base = OTHER; note = 2'-O-methylcytidine-3'-phosphate
  modified_base 11: mod_base = OTHER; note = 2'-O-methylcytidine-3'-phosphate
  modified_base 12: mod_base = OTHER; note = 2'-O-methyluridine-3'-phosphate
  modified_base 13: mod_base = OTHER; note = 2'-O-methylguanosine-3'-phosphate
  modified_base 14: mod_base = OTHER; note = 2'-deoxy-2'-fluorouridine-3'-phosphate
  modified_base 15: mod_base = OTHER; note = 2'-O-methyluridine-3'-phosphate
  modified_base 16: mod_base = OTHER; note = 2'-deoxy-2'-fluoroguanosine-3'-phosphate
  modified_base 17: mod_base = OTHER; note = 2'-O-methyladenosine-3'-phosphate
  modified_base 18: mod_base = OTHER; note = 2'-O-methylguanosine-3'-phosphate
  modified_base 19: mod_base = OTHER; note = 2'-O-methyluridine-3'-phosphate
  modified_base 20: mod_base = OTHER; note = 2'-O-methyluridine-3'-phosphate
  modified_base 21: mod_base = OTHER; note = 2'-O-methylcytidine-3'-phosphorothioate
  modified_base 22: mod_base = OTHER; note = 2'-O-methyladenosine-3'-phosphorothioate
  modified_base 23: mod_base = OTHER; note = 2'-O-methyluridine
agaaggtggcctgttgagttcat

SEQ ID NO: 1118 - RNA, 23 nt, synthetic construct
  source 1..23: mol_type = other RNA
  modified_base 1: mod_base = OTHER; note = 2'-O-methyladenosine-3'-phosphorothioate
  modified_base 2: mod_base = OTHER; note = 2'-deoxy-2'-fluoroguanosine-3'-phosphorothioate
  modified_base 3: mod_base = OTHER; note = 2'-O-methylcytidine-3'-phosphate
  modified_base 4: mod_base = OTHER; note = 2'-O-methyladenosine-3'-phosphate
  modified_base 5: mod_base = OTHER; note = 2'-O-methyluridine-3'-phosphate
  modified_base 6: mod_base = OTHER; note = 2'-deoxy-2'-fluorocytidine-3'-phosphate
  modified_base 7: mod_base = OTHER; note = 2'-O-methylcytidine-3'-phosphate
  modified_base 8: mod_base = OTHER; note = 2'-deoxy-2'-fluorouridine-3'-phosphate
  modified_base 9: mod_base = OTHER; note = 2'-deoxy-2'-fluoroguanosine-3'-phosphate
  modified_base 10: mod_base = OTHER; note = 2'-O-methyladenosine-3'-phosphate
  modified_base 11: mod_base = OTHER; note = 2'-O-methyladenosine-3'-phosphate
  modified_base 12: mod_base = OTHER; note = 2'-O-methylguanosine-3'-phosphate
  modified_base 13: mod_base = OTHER; note = 2'-O-methylguanosine-3'-phosphate
  modified_base 14: mod_base = OTHER; note = 2'-deoxy-2'-fluorouridine-3'-phosphate
  modified_base 15: mod_base = OTHER; note = 2'-O-methylguanosine-3'-phosphate
  modified_base 16: mod_base = OTHER; note = 2'-deoxy-2'-fluoroguanosine-3'-phosphate
  modified_base 17: mod_base = OTHER; note = 2'-O-methylcytidine-3'-phosphate
  modified_base 18: mod_base = OTHER; note = 2'-O-methylcytidine-3'-phosphate
  modified_base 19: mod_base = OTHER; note = 2'-O-methyluridine-3'-phosphate
  modified_base 20: mod_base = OTHER; note = 2'-O-methylguanosine-3'-phosphate
  modified_base 21: mod_base = OTHER; note = 2'-O-methyluridine-3'-phosphorothioate
  modified_base 22: mod_base = OTHER; note = 2'-O-methyluridine-3'-phosphorothioate
  modified_base 23: mod_base = OTHER; note = 2'-O-methylguanosine
agcatcctgaaggtggcctgttg

SEQ ID NO: 1119 - RNA, 23 nt, synthetic construct
  source 1..23: mol_type = other RNA
  modified_base 1: mod_base = OTHER; note = 2'-O-methyladenosine-3'-phosphorothioate
  modified_base 2: mod_base = OTHER; note = 2'-deoxy-2'-fluoroadenosine-3'-phosphorothioate
  modified_base 3: mod_base = OTHER; note = 2'-O-methylguanosine-3'-phosphate
  modified_base 4: mod_base = OTHER; note = 2'-O-methylguanosine-3'-phosphate
  modified_base 5: mod_base = OTHER; note = 2'-O-methylcytidine-3'-phosphate
  modified_base 6: mod_base = OTHER; note = 2'-deoxy-2'-fluoroadenosine-3'-phosphate
  modified_base 7: mod_base = OTHER; note = 2'-O-methylcytidine-3'-phosphate
  modified_base 8: mod_base = OTHER; note = 2'-deoxy-2'-fluoroadenosine-3'-phosphate
  modified_base 9: mod_base = OTHER; note = 2'-deoxy-2'-fluorouridine-3'-phosphate
  modified_base 10: mod_base = OTHER; note = 2'-O-methylguanosine-3'-phosphate
  modified_base 11: mod_base = OTHER; note = 2'-O-methylguanosine-3'-phosphate
  modified_base 12: mod_base = OTHER; note = 2'-O-methyladenosine-3'-phosphate
  modified_base 13: mod_base = OTHER; note = 2'-O-methylguanosine-3'-phosphate
  modified_base 14: mod_base = OTHER; note = 2'-deoxy-2'-fluorocytidine-3'-phosphate
  modified_base 15: mod_base = OTHER; note = 2'-O-methylguanosine-3'-phosphate
  modified_base 16: mod_base = OTHER; note = 2'-deoxy-2'-fluoroadenosine-3'-phosphate
  modified_base 17: mod_base = OTHER; note = 2'-O-methylguanosine-3'-phosphate
  modified_base 18: mod_base = OTHER; note = 2'-O-methylguanosine-3'-phosphate
  modified_base 19: mod_base = OTHER; note = 2'-O-methyluridine-3'-phosphate
  modified_base 20: mod_base = OTHER; note = 2'-O-methylguanosine-3'-phosphate
  modified_base 21: mod_base = OTHER; note = 2'-O-methylguanosine-3'-phosphorothioate
  modified_base 22: mod_base = OTHER; note = 2'-O-methylcytidine-3'-phosphorothioate
  modified_base 23: mod_base = OTHER; note = 2'-O-methyladenosine
aaggcacatggagcgaggtggca

SEQ ID NO: 1120 - RNA, 23 nt, synthetic construct
  source 1..23: mol_type = other RNA
  modified_base 1: mod_base = OTHER; note = 2'-O-methyladenosine-3'-phosphorothioate
  modified_base 2: mod_base = OTHER; note = 2'-deoxy-2'-fluoroguanosine-3'-phosphorothioate
  modified_base 3: mod_base = OTHER; note = 2'-O-methyladenosine-3'-phosphate
  modified_base 4: mod_base = OTHER; note = 2'-O-methylguanosine-3'-phosphate
  modified_base 5: mod_base = OTHER; note = 2'-O-methyluridine-3'-phosphate
  modified_base 6: mod_base = OTHER; note = 2'-deoxy-2'-fluoroguanosine-3'-phosphate
  modified_base 7: mod_base = OTHER; note = 2'-O-methyladenosine-3'-phosphate
  modified_base 8: mod_base = OTHER; note = 2'-deoxy-2'-fluoroguanosine-3'-phosphate
  modified_base 9: mod_base = OTHER; note = 2'-deoxy-2'-fluoroguanosine-3'-phosphate
  modified_base 10: mod_base = OTHER; note = 2'-O-methylcytidine-3'-phosphate
  modified_base 11: mod_base = OTHER; note = 2'-O-methyladenosine-3'-phosphate
  modified_base 12: mod_base = OTHER; note = 2'-O-methylcytidine-3'-phosphate
  modified_base 13: mod_base = OTHER; note = 2'-O-methyladenosine-3'-phosphate
  modified_base 14: mod_base = OTHER; note = 2'-deoxy-2'-fluorouridine-3'-phosphate
  modified_base 15: mod_base = OTHER; note = 2'-O-methylguanosine-3'-phosphate
  modified_base 16: mod_base = OTHER; note = 2'-deoxy-2'-fluoroguanosine-3'-phosphate
  modified_base 17: mod_base = OTHER; note = 2'-O-methyladenosine-3'-phosphate
  modified_base 18: mod_base = OTHER; note = 2'-O-methylguanosine-3'-phosphate
  modified_base 19: mod_base = OTHER; note = 2'-O-methylcytidine-3'-phosphate
  modified_base 20: mod_base = OTHER; note = 2'-O-methylguanosine-3'-phosphate
  modified_base 21: mod_base = OTHER; note = 2'-O-methyladenosine-3'-phosphorothioate
  modified_base 22: mod_base = OTHER; note = 2'-O-methylguanosine-3'-phosphorothioate
  modified_base 23: mod_base = OTHER; note = 2'-O-methylguanosine
agagtgaggcacatggagcgagg

SEQ ID NO: 1121 - RNA, 23 nt, synthetic construct
  source 1..23: mol_type = other RNA
  modified_base 1: mod_base = OTHER; note = 2'-O-methyladenosine-3'-phosphorothioate
  modified_base 2: mod_base = OTHER; note = 2'-deoxy-2'-fluorouridine-3'-phosphorothioate
  modified_base 3: mod_base = OTHER; note = 2'-O-methyluridine-3'-phosphate
  modified_base 4: mod_base = OTHER; note = 2'-O-methylcytidine-3'-phosphate
  modified_base 5: mod_base = OTHER; note = 2'-O-methylcytidine-3'-phosphate
  modified_base 6: mod_base = OTHER; note = 2'-deoxy-2'-fluorouridine-3'-phosphate
  modified_base 7: mod_base = OTHER; note = 2'-O-methylguanosine-3'-phosphate
  modified_base 8: mod_base = OTHER; note = 2'-deoxy-2'-fluorouridine-3'-phosphate
  modified_base 9: mod_base = OTHER; note = 2'-deoxy-2'-fluoroguanosine-3'-phosphate
  modified_base 10: mod_base = OTHER; note = 2'-O-methyladenosine-3'-phosphate
  modified_base 11: mod_base = OTHER; note = 2'-O-methylguanosine-3'-phosphate
  modified_base 12: mod_base = OTHER; note = 2'-O-methyluridine-3'-phosphate
  modified_base 13: mod_base = OTHER; note = 2'-O-methylguanosine-3'-phosphate
  modified_base 14: mod_base = OTHER; note = 2'-deoxy-2'-fluoroadenosine-3'-phosphate
  modified_base 15: mod_base = OTHER; note = 2'-O-methylguanosine-3'-phosphate
  modified_base 16: mod_base = OTHER; note = 2'-deoxy-2'-fluoroguanosine-3'-phosphate
  modified_base 17: mod_base = OTHER; note = 2'-O-methylcytidine-3'-phosphate
  modified_base 18: mod_base = OTHER; note = 2'-O-methyladenosine-3'-phosphate
  modified_base 19: mod_base = OTHER; note = 2'-O-methylcytidine-3'-phosphate
  modified_base 20: mod_base = OTHER; note = 2'-O-methyladenosine-3'-phosphate
  modified_base 21: mod_base = OTHER; note = 2'-O-methyluridine-3'-phosphorothioate
  modified_base 22: mod_base = OTHER; note = 2'-O-methylguanosine-3'-phosphorothioate
  modified_base 23: mod_base = OTHER; note = 2'-O-methylguanosine
attcctgtgagtgaggcacatgg

SEQ ID NO: 1122 - RNA, 23 nt, synthetic construct
  source 1..23: mol_type = other RNA
  modified_base 1: mod_base = OTHER; note = 2'-O-methyladenosine-3'-phosphorothioate
  modified_base 2: mod_base = OTHER; note = 2'-deoxy-2'-fluorouridine-3'-phosphorothioate
  modified_base 3: mod_base = OTHER; note = 2'-O-methyluridine-3'-phosphate
  modified_base 4: mod_base = OTHER; note = 2'-O-methyluridine-3'-phosphate
  modified_base 5: mod_base = OTHER; note = 2'-O-methylcytidine-3'-phosphate
  modified_base 6: mod_base = OTHER; note = 2'-deoxy-2'-fluorocytidine-3'-phosphate
  modified_base 7: mod_base = OTHER; note = 2'-O-methyluridine-3'-phosphate
  modified_base 8: mod_base = OTHER; note = 2'-deoxy-2'-fluorouridine-3'-phosphate
  modified_base 9: mod_base = OTHER; note = 2'-deoxy-2'-fluorocytidine-3'-phosphate
  modified_base 10: mod_base = OTHER; note = 2'-O-methylcytidine-3'-phosphate
  modified_base 11: mod_base = OTHER; note = 2'-O-methyluridine-3'-phosphate
  modified_base 12: mod_base = OTHER; note = 2'-O-methylguanosine-3'-phosphate
  modified_base 13: mod_base = OTHER; note = 2'-O-methyluridine-3'-phosphate
  modified_base 14: mod_base = OTHER; note = 2'-deoxy-2'-fluoroguanosine-3'-phosphate
  modified_base 15: mod_base = OTHER; note = 2'-O-methyladenosine-3'-phosphate
  modified_base 16: mod_base = OTHER; note = 2'-deoxy-2'-fluoroguanosine-3'-phosphate
  modified_base 17: mod_base = OTHER; note = 2'-O-methyluridine-3'-phosphate
  modified_base 18: mod_base = OTHER; note = 2'-O-methylguanosine-3'-phosphate
  modified_base 19: mod_base = OTHER; note = 2'-O-methyladenosine-3'-phosphate
  modified_base 20: mod_base = OTHER; note = 2'-O-methylguanosine-3'-phosphate
  modified_base 21: mod_base = OTHER; note = 2'-O-methylguanosine-3'-phosphorothioate
  modified_base 22: mod_base = OTHER; note = 2'-O-methylcytidine-3'-phosphorothioate
  modified_base 23: mod_base = OTHER; note = 2'-O-methyladenosine
atttccttcctgtgagtgaggca

SEQ ID NO: 1123 - RNA, 23 nt, synthetic construct
  source 1..23: mol_type = other RNA
  modified_base 1: mod_base = OTHER; note = 2'-O-methyladenosine-3'-phosphorothioate
  modified_base 2: mod_base = OTHER; note = 2'-deoxy-2'-fluoroadenosine-3'-phosphorothioate
  modified_base 3: mod_base = OTHER; note = 2'-O-methylguanosine-3'-phosphate
  modified_base 4: mod_base = OTHER; note = 2'-O-methylguanosine-3'-phosphate
  modified_base 5: mod_base = OTHER; note = 2'-O-methyluridine-3'-phosphate
  modified_base 6: mod_base = OTHER; note = 2'-deoxy-2'-fluoroguanosine-3'-phosphate
  modified_base 7: mod_base = OTHER; note = 2'-O-methylcytidine-3'-phosphate
  modified_base 8: mod_base = OTHER; note = 2'-deoxy-2'-fluorouridine-3'-phosphate
  modified_base 9: mod_base = OTHER; note = 2'-deoxy-2'-fluoroguanosine-3'-phosphate
  modified_base 10: mod_base = OTHER; note = 2'-O-methyluridine-3'-phosphate
  modified_base 11: mod_base = OTHER; note = 2'-O-methyluridine-3'-phosphate
  modified_base 12: mod_base = OTHER; note = 2'-O-methyluridine-3'-phosphate
  modified_base 13: mod_base = OTHER; note = 2'-O-methylcytidine-3'-phosphate
  modified_base 14: mod_base = OTHER; note = 2'-deoxy-2'-fluorocytidine-3'-phosphate
  modified_base 15: mod_base = OTHER; note = 2'-O-methyluridine-3'-phosphate
  modified_base 16: mod_base = OTHER; note = 2'-deoxy-2'-fluorouridine-3'-phosphate
  modified_base 17: mod_base = OTHER; note = 2'-O-methylcytidine-3'-phosphate
  modified_base 18: mod_base = OTHER; note = 2'-O-methylcytidine-3'-phosphate
  modified_base 19: mod_base = OTHER; note = 2'-O-methyluridine-3'-phosphate
  modified_base 20: mod_base = OTHER; note = 2'-O-methylguanosine-3'-phosphate
  modified_base 21: mod_base = OTHER; note = 2'-O-methyluridine-3'-phosphorothioate
  modified_base 22: mod_base = OTHER; note = 2'-O-methylguanosine-3'-phosphorothioate
  modified_base 23: mod_base = OTHER; note = 2'-O-methyladenosine
aaggtgctgtttccttcctgtga

SEQ ID NO: 1124 - RNA, 23 nt, synthetic construct
  source 1..23: mol_type = other RNA
  modified_base 1: mod_base = OTHER; note = 2'-O-methyladenosine-3'-phosphorothioate
  modified_base 2: mod_base = OTHER; note = 2'-deoxy-2'-fluoroguanosine-3'-phosphorothioate
  modified_base 3: mod_base = OTHER; note = 2'-O-methyladenosine-3'-phosphate
  modified_base 4: mod_base = OTHER; note = 2'-O-methylguanosine-3'-phosphate
  modified_base 5: mod_base = OTHER; note = 2'-O-methyladenosine-3'-phosphate
  modified_base 6: mod_base = OTHER; note = 2'-deoxy-2'-fluoroguanosine-3'-phosphate
  modified_base 7: mod_base = OTHER; note = 2'-O-methyladenosine-3'-phosphate
  modified_base 8: mod_base = OTHER; note = 2'-deoxy-2'-fluoroguanosine-3'-phosphate
  modified_base 9: mod_base = OTHER; note = 2'-deoxy-2'-fluoroguanosine-3'-phosphate
  modified_base 10: mod_base = OTHER; note = 2'-O-methyluridine-3'-phosphate
  modified_base 11: mod_base = OTHER; note = 2'-O-methylguanosine-3'-phosphate
  modified_base 12: mod_base = OTHER; note = 2'-O-methylcytidine-3'-phosphate
  modified_base 13: mod_base = OTHER; note = 2'-O-methyluridine-3'-phosphate
  modified_base 14: mod_base = OTHER; note = 2'-deoxy-2'-fluoroguanosine-3'-phosphate
  modified_base 15: mod_base = OTHER; note = 2'-O-methyluridine-3'-phosphate
  modified_base 16: mod_base = OTHER; note = 2'-deoxy-2'-fluorouridine-3'-phosphate
  modified_base 17: mod_base = OTHER; note = 2'-O-methyluridine-3'-phosphate
  modified_base 18: mod_base = OTHER; note = 2'-O-methylcytidine-3'-phosphate
  modified_base 19: mod_base = OTHER; note = 2'-O-methylcytidine-3'-phosphate
  modified_base 20: mod_base = OTHER; note = 2'-O-methyluridine-3'-phosphate
  modified_base 21: mod_base = OTHER; note = 2'-O-methyluridine-3'-phosphorothioate
  modified_base 22: mod_base = OTHER; note = 2'-O-methylcytidine-3'-phosphorothioate
  modified_base 23: mod_base = OTHER; note = 2'-O-methylcytidine
agagagaggtgctgtttccttcc

SEQ ID NO: 1125 - RNA, 23 nt, synthetic construct
  source 1..23: mol_type = other RNA
  modified_base 1: mod_base = OTHER; note = 2'-O-methyladenosine-3'-phosphorothioate
  modified_base 2: mod_base = OTHER; note = 2'-deoxy-2'-fluorocytidine-3'-phosphorothioate
  modified_base 3: mod_base = OTHER; note = 2'-O-methyluridine-3'-phosphate
  modified_base 4: mod_base = OTHER; note = 2'-O-methylguanosine-3'-phosphate
  modified_base 5: mod_base = OTHER; note = 2'-O-methyladenosine-3'-phosphate
  modified_base 6: mod_base = OTHER; note = 2'-deoxy-2'-fluoroadenosine-3'-phosphate
  modified_base 7: mod_base = OTHER; note = 2'-O-methylguanosine-3'-phosphate
  modified_base 8: mod_base = OTHER; note = 2'-deoxy-2'-fluoroadenosine-3'-phosphate
  modified_base 9: mod_base = OTHER; note = 2'-deoxy-2'-fluorocytidine-3'-phosphate
  modified_base 10: mod_base = OTHER; note = 2'-O-methylcytidine-3'-phosphate
  modified_base 11: mod_base = OTHER; note = 2'-O-methylcytidine-3'-phosphate
  modified_base 12: mod_base = OTHER; note = 2'-O-methyluridine-3'-phosphate
  modified_base 13: mod_base = OTHER; note = 2'-O-methylcytidine-3'-phosphate
  modified_base 14: mod_base = OTHER; note = 2'-deoxy-2'-fluorocytidine-3'-phosphate
  modified_base 15: mod_base = OTHER; note = 2'-O-methyluridine-3'-phosphate
  modified_base 16: mod_base = OTHER; note = 2'-deoxy-2'-fluoroguanosine-3'-phosphate
  modified_base 17: mod_base = OTHER; note = 2'-O-methylguanosine-3'-phosphate
  modified_base 18: mod_base = OTHER; note = 2'-O-methyladenosine-3'-phosphate
  modified_base 19: mod_base = OTHER; note = 2'-O-methylguanosine-3'-phosphate
  modified_base 20: mod_base = OTHER; note = 2'-O-methyladenosine-3'-phosphate
  modified_base 21: mod_base = OTHER; note = 2'-O-methylguanosine-3'-phosphorothioate
  modified_base 22: mod_base = OTHER; note = 2'-O-methyladenosine-3'-phosphorothioate
  modified_base 23: mod_base = OTHER; note = 2'-O-methylguanosine
actgaagaccctcctggagagag

SEQ ID NO: 1126 - RNA, 23 nt, synthetic construct
  source 1..23: mol_type = other RNA
  modified_base 1: mod_base = OTHER; note = 2'-O-methyladenosine-3'-phosphorothioate
  modified_base 2: mod_base = OTHER; note = 2'-deoxy-2'-fluoroadenosine-3'-phosphorothioate
  modified_base 3: mod_base = OTHER; note = 2'-O-methylguanosine-3'-phosphate
  modified_base 4: mod_base = OTHER; note = 2'-O-methyladenosine-3'-phosphate
  modified_base 5: mod_base = OTHER; note = 2'-O-methyluridine-3'-phosphate
  modified_base 6: mod_base = OTHER; note = 2'-deoxy-2'-fluorocytidine-3'-phosphate
  modified_base 7: mod_base = OTHER; note = 2'-O-methylcytidine-3'-phosphate
  modified_base 8: mod_base = OTHER; note = 2'-deoxy-2'-fluorouridine-3'-phosphate
  modified_base 9: mod_base = OTHER; note = 2'-deoxy-2'-fluoroguanosine-3'-phosphate
  modified_base 10: mod_base = OTHER; note = 2'-O-methyladenosine-3'-phosphate
  modified_base 11: mod_base = OTHER; note = 2'-O-methyladenosine-3'-phosphate
  modified_base 12: mod_base = OTHER; note = 2'-O-methylguanosine-3'-phosphate
  modified_base 13: mod_base = OTHER; note = 2'-O-methyladenosine-3'-phosphate
  modified_base 14: mod_base = OTHER; note = 2'-deoxy-2'-fluorocytidine-3'-phosphate
  modified_base 15: mod_base = OTHER; note = 2'-O-methylcytidine-3'-phosphate
  modified_base 16: mod_base = OTHER; note = 2'-deoxy-2'-fluorocytidine-3'-phosphate
  modified_base 17: mod_base = OTHER; note = 2'-O-methyluridine-3'-phosphate
  modified_base 18: mod_base = OTHER; note = 2'-O-methylcytidine-3'-phosphate
  modified_base 19: mod_base = OTHER; note = 2'-O-methylcytidine-3'-phosphate
  modified_base 20: mod_base = OTHER; note = 2'-O-methyluridine-3'-phosphate
  modified_base 21: mod_base = OTHER; note = 2'-O-methylguanosine-3'-phosphorothioate
  modified_base 22: mod_base = OTHER; note = 2'-O-methylguanosine-3'-phosphorothioate
  modified_base 23: mod_base = OTHER; note = 2'-O-methyladenosine
aagatcctgaagaccctcctgga

SEQ ID NO: 1127 - RNA, 23 nt, synthetic construct
  source 1..23: mol_type = other RNA
  modified_base 1: mod_base = OTHER; note = 2'-O-methyladenosine-3'-phosphorothioate
  modified_base 2: mod_base = OTHER; note = 2'-deoxy-2'-fluorouridine-3'-phosphorothioate
  modified_base 3: mod_base = OTHER; note = 2'-O-methylguanosine-3'-phosphate
  modified_base 4: mod_base = OTHER; note = 2'-O-methylguanosine-3'-phosphate
  modified_base 5: mod_base = OTHER; note = 2'-O-methyladenosine-3'-phosphate
  modified_base 6: mod_base = OTHER; note = 2'-deoxy-2'-fluorouridine-3'-phosphate
  modified_base 7: mod_base = OTHER; note = 2'-O-methylguanosine-3'-phosphate
  modified_base 8: mod_base = OTHER; note = 2'-deoxy-2'-fluoroadenosine-3'-phosphate
  modified_base 9: mod_base = OTHER; note = 2'-deoxy-2'-fluoroguanosine-3'-phosphate
  modified_base 10: mod_base = OTHER; note = 2'-O-methyladenosine-3'-phosphate
  modified_base 11: mod_base = OTHER; note = 2'-O-methyluridine-3'-phosphate
  modified_base 12: mod_base = OTHER; note = 2'-O-methylcytidine-3'-phosphate
  modified_base 13: mod_base = OTHER; note = 2'-O-methylcytidine-3'-phosphate
  modified_base 14: mod_base = OTHER; note = 2'-deoxy-2'-fluorouridine-3'-phosphate
  modified_base 15: mod_base = OTHER; note = 2'-O-methylguanosine-3'-phosphate
  modified_base 16: mod_base = OTHER; note = 2'-deoxy-2'-fluoroadenosine-3'-phosphate
  modified_base 17: mod_base = OTHER; note = 2'-O-methyladenosine-3'-phosphate
  modified_base 18: mod_base = OTHER; note = 2'-O-methylguanosine-3'-phosphate
  modified_base 19: mod_base = OTHER; note = 2'-O-methyladenosine-3'-phosphate
  modified_base 20: mod_base = OTHER; note = 2'-O-methylcytidine-3'-phosphate
  modified_base 21: mod_base = OTHER; note = 2'-O-methylcytidine-3'-phosphorothioate
  modified_base 22: mod_base = OTHER; note = 2'-O-methylcytidine-3'-phosphorothioate
  modified_base 23: mod_base = OTHER; note = 2'-O-methyluridine
atggatgagatcctgaagaccct

SEQ ID NO: 1128 - RNA, 23 nt, synthetic construct
  source 1..23: mol_type = other RNA
  modified_base 1: mod_base = OTHER; note = 2'-O-methyladenosine-3'-phosphorothioate
  modified_base 2: mod_base = OTHER; note = 2'-deoxy-2'-fluorocytidine-3'-phosphorothioate
  modified_base 3: mod_base = OTHER; note = 2'-O-methyluridine-3'-phosphate
  modified_base 4: mod_base = OTHER; note = 2'-O-methylguanosine-3'-phosphate
  modified_base 5: mod_base = OTHER; note = 2'-O-methyluridine-3'-phosphate
  modified_base 6: mod_base = OTHER; note = 2'-deoxy-2'-fluoroguanosine-3'-phosphate
  modified_base 7: mod_base = OTHER; note = 2'-O-methyluridine-3'-phosphate
  modified_base 8: mod_base = OTHER; note = 2'-deoxy-2'-fluoroguanosine-3'-phosphate
  modified_base 9: mod_base = OTHER; note = 2'-deoxy-2'-fluoroguanosine-3'-phosphate
  modified_base 10: mod_base = OTHER; note = 2'-O-methyladenosine-3'-phosphate
  modified_base 11: mod_base = OTHER; note = 2'-O-methyluridine-3'-phosphate
  modified_base 12: mod_base = OTHER; note = 2'-O-methylguanosine-3'-phosphate
  modified_base 13: mod_base = OTHER; note = 2'-O-methyladenosine-3'-phosphate
  modified_base 14: mod_base = OTHER; note = 2'-deoxy-2'-fluoroguanosine-3'-phosphate
  modified_base 15: mod_base = OTHER; note = 2'-O-methyladenosine-3'-phosphate
  modified_base 16: mod_base = OTHER; note = 2'-deoxy-2'-fluorouridine-3'-phosphate
  modified_base 17: mod_base = OTHER; note = 2'-O-methylcytidine-3'-phosphate
  modified_base 18: mod_base = OTHER; note = 2'-O-methylcytidine-3'-phosphate
  modified_base 19: mod_base = OTHER; note = 2'-O-methyluridine-3'-phosphate
  modified_base 20: mod_base = OTHER; note = 2'-O-methylguanosine-3'-phosphate
  modified_base 21: mod_base = OTHER; note = 2'-O-methyladenosine-3'-phosphorothioate
  modified_base 22: mod_base = OTHER; note = 2'-O-methyladenosine-3'-phosphorothioate
  modified_base 23: mod_base = OTHER; note = 2'-O-methylguanosine
actgtgtggatgagatcctgaag

SEQ ID NO: 1129 - RNA, 23 nt, synthetic construct
  source 1..23: mol_type = other RNA
  modified_base 1: mod_base = OTHER; note = 2'-O-methyladenosine-3'-phosphorothioate
  modified_base 2: mod_base = OTHER; note = 2'-deoxy-2'-fluorocytidine-3'-phosphorothioate
  modified_base 3: mod_base = OTHER; note = 2'-O-methyladenosine-3'-phosphate
  modified_base 4: mod_base = OTHER; note = 2'-O-methyladenosine-3'-phosphate
  modified_base 5: mod_base = OTHER; note = 2'-O-methylguanosine-3'-phosphate
  modified_base 6: mod_base = OTHER; note = 2'-deoxy-2'-fluoroguanosine-3'-phosphate
  modified_base 7: mod_base = OTHER; note = 2'-O-methyluridine-3'-phosphate
  modified_base 8: mod_base = OTHER; note = 2'-deoxy-2'-fluoroguanosine-3'-phosphate
  modified_base 9: mod_base = OTHER; note = 2'-deoxy-2'-fluoroguanosine-3'-phosphate
  modified_base 10: mod_base = OTHER; note = 2'-O-methylcytidine-3'-phosphate
  modified_base 11: mod_base = OTHER; note = 2'-O-methyluridine-3'-phosphate
  modified_base 12: mod_base = OTHER; note = 2'-O-methylguanosine-3'-phosphate
  modified_base 13: mod_base = OTHER; note = 2'-O-methyluridine-3'-phosphate
  modified_base 14: mod_base = OTHER; note = 2'-deoxy-2'-fluoroguanosine-3'-phosphate
  modified_base 15: mod_base = OTHER; note = 2'-O-methyluridine-3'-phosphate
  modified_base 16: mod_base = OTHER; note = 2'-deoxy-2'-fluoroguanosine-3'-phosphate
  modified_base 17: mod_base = OTHER; note = 2'-O-methylguanosine-3'-phosphate
  modified_base 18: mod_base = OTHER; note = 2'-O-methyladenosine-3'-phosphate
  modified_base 19: mod_base = OTHER; note = 2'-O-methyluridine-3'-phosphate
  modified_base 20: mod_base = OTHER; note = 2'-O-methylguanosine-3'-phosphate
  modified_base 21: mod_base = OTHER; note = 2'-O-methyladenosine-3'-phosphorothioate
  modified_base 22: mod_base = OTHER; note = 2'-O-methylguanosine-3'-phosphorothioate
  modified_base 23: mod_base = OTHER; note = 2'-O-methyladenosine
acaaggtggctgtgtggatgaga

SEQ ID NO: 1130 - RNA, 23 nt, synthetic construct
  source 1..23: mol_type = other RNA
  modified_base 1: mod_base = OTHER; note = 2'-O-methyladenosine-3'-phosphorothioate
  modified_base 2: mod_base = OTHER; note = 2'-deoxy-2'-fluoroguanosine-3'-phosphorothioate
  modified_base 3: mod_base = OTHER; note = 2'-O-methyluridine-3'-phosphate
  modified_base 4: mod_base = OTHER; note = 2'-O-methylcytidine-3'-phosphate
  modified_base 5: mod_base = OTHER; note = 2'-O-methyladenosine-3'-phosphate
  modified_base 6: mod_base = OTHER; note = 2'-deoxy-2'-fluorocytidine-3'-phosphate
  modified_base 7: mod_base = OTHER; note = 2'-O-methylcytidine-3'-phosphate
  modified_base 8: mod_base = OTHER; note = 2'-deoxy-2'-fluoroadenosine-3'-phosphate
  modified_base 9: mod_base = OTHER; note = 2'-deoxy-2'-fluoroadenosine-3'-phosphate
  modified_base 10: mod_base = OTHER; note = 2'-O-methylguanosine-3'-phosphate
  modified_base 11: mod_base = OTHER; note = 2'-O-methylguanosine-3'-phosphate
  modified_base 12: mod_base = OTHER; note = 2'-O-methyluridine-3'-phosphate
  modified_base 13: mod_base = OTHER; note = 2'-O-methylguanosine-3'-phosphate
  modified_base 14: mod_base = OTHER; note = 2'-deoxy-2'-fluoroguanosine-3'-phosphate
  modified_base 15: mod_base = OTHER; note = 2'-O-methylcytidine-3'-phosphate
  modified_base 16: mod_base = OTHER; note = 2'-deoxy-2'-fluorouridine-3'-phosphate
  modified_base 17: mod_base = OTHER; note = 2'-O-methylguanosine-3'-phosphate
  modified_base 18: mod_base = OTHER; note = 2'-O-methyluridine-3'-phosphate
  modified_base 19: mod_base = OTHER; note = 2'-O-methylguanosine-3'-phosphate
  modified_base 20: mod_base = OTHER; note = 2'-O-methyluridine-3'-phosphate
  modified_base 21: mod_base = OTHER; note = 2'-O-methylguanosine-3'-phosphorothioate
  modified_base 22: mod_base = OTHER; note = 2'-O-methylguanosine-3'-phosphorothioate
  modified_base 23: mod_base = OTHER; note = 2'-O-methyladenosine
agtcaccaaggtggctgtgtgga

SEQ ID NO: 1131 - RNA, 23 nt, synthetic construct
  source 1..23: mol_type = other RNA
  modified_base 1: mod_base = OTHER; note = 2'-O-methyladenosine-3'-phosphorothioate
  modified_base 2: mod_base = OTHER; note = 2'-deoxy-2'-fluorouridine-3'-phosphorothioate
  modified_base 3: mod_base = OTHER; note = 2'-O-methyladenosine-3'-phosphate
  modified_base 4: mod_base = OTHER; note = 2'-O-methylcytidine-3'-phosphate
  modified_base 5: mod_base = OTHER; note = 2'-O-methyladenosine-3'-phosphate
  modified_base 6: mod_base = OTHER; note = 2'-deoxy-2'-fluoroguanosine-3'-phosphate
  modified_base 7: mod_base = OTHER; note = 2'-O-methylguanosine-3'-phosphate
  modified_base 8: mod_base = OTHER; note = 2'-deoxy-2'-fluorouridine-3'-phosphate
  modified_base 9: mod_base = OTHER; note = 2'-deoxy-2'-fluorocytidine-3'-phosphate
  modified_base 10: mod_base = OTHER; note = 2'-O-methyladenosine-3'-phosphate
  modified_base 11: mod_base = OTHER; note = 2'-O-methylcytidine-3'-phosphate
  modified_base 12: mod_base = OTHER; note = 2'-O-methylcytidine-3'-phosphate
  modified_base 13: mod_base = OTHER; note = 2'-O-methyladenosine-3'-phosphate
  modified_base 14: mod_base = OTHER; note = 2'-deoxy-2'-fluoroadenosine-3'-phosphate
  modified_base 15: mod_base = OTHER; note = 2'-O-methylguanosine-3'-phosphate
  modified_base 16: mod_base = OTHER; note = 2'-deoxy-2'-fluoroguanosine-3'-phosphate
  modified_base 17: mod_base = OTHER; note = 2'-O-methyluridine-3'-phosphate
  modified_base 18: mod_base = OTHER; note = 2'-O-methylguanosine-3'-phosphate
  modified_base 19: mod_base = OTHER; note = 2'-O-methylguanosine-3'-phosphate
  modified_base 20: mod_base = OTHER; note = 2'-O-methylcytidine-3'-phosphate
  modified_base 21: mod_base = OTHER; note = 2'-O-methyluridine-3'-phosphorothioate
  modified_base 22: mod_base = OTHER; note = 2'-O-methylguanosine-3'-phosphorothioate
  modified_base 23: mod_base = OTHER; note = 2'-O-methyluridine
atacaggtcaccaaggtggctgt

SEQ ID NO: 1132 - RNA, 23 nt, synthetic construct
  source 1..23: mol_type = other RNA
  modified_base 1: mod_base = OTHER; note = 2'-O-methyladenosine-3'-phosphorothioate
  modified_base 2: mod_base = OTHER; note = 2'-deoxy-2'-fluoroadenosine-3'-phosphorothioate
  modified_base 3: mod_base = OTHER; note = 2'-O-methyladenosine-3'-phosphate
  modified_base 4: mod_base = OTHER; note = 2'-O-methyladenosine-3'-phosphate
  modified_base 5: mod_base = OTHER; note = 2'-O-methyladenosine-3'-phosphate
  modified_base 6: mod_base = OTHER; note = 2'-deoxy-2'-fluoroguanosine-3'-phosphate
  modified_base 7: mod_base = OTHER; note = 2'-O-methyluridine-3'-phosphate
  modified_base 8: mod_base = OTHER; note = 2'-deoxy-2'-fluoroadenosine-3'-phosphate
  modified_base 9: mod_base = OTHER; note = 2'-deoxy-2'-fluorocytidine-3'-phosphate
  modified_base 10: mod_base = OTHER; note = 2'-O-methyladenosine-3'-phosphate
  modified_base 11: mod_base = OTHER; note = 2'-O-methylguanosine-3'-phosphate
  modified_base 12: mod_base = OTHER; note = 2'-O-methylguanosine-3'-phosphate
  modified_base 13: mod_base = OTHER; note = 2'-O-methyluridine-3'-phosphate
  modified_base 14: mod_base = OTHER; note = 2'-deoxy-2'-fluorocytidine-3'-phosphate
  modified_base 15: mod_base = OTHER; note = 2'-O-methyladenosine-3'-phosphate
  modified_base 16: mod_base = OTHER; note = 2'-deoxy-2'-fluorocytidine-3'-phosphate
  modified_base 17: mod_base = OTHER; note = 2'-O-methylcytidine-3'-phosphate
  modified_base 18: mod_base = OTHER; note = 2'-O-methyladenosine-3'-phosphate
  modified_base 19: mod_base = OTHER; note = 2'-O-methyladenosine-3'-phosphate
  modified_base 20: mod_base = OTHER; note = 2'-O-methylguanosine-3'-phosphate
  modified_base 21: mod_base = OTHER; note = 2'-O-methylguanosine-3'-phosphorothioate
  modified_base 22: mod_base = OTHER; note = 2'-O-methyluridine-3'-phosphorothioate
  modified_base 23: mod_base = OTHER; note = 2'-O-methylguanosine
aaaaagtacaggtcaccaaggtg

SEQ ID NO: 1133 - RNA, 23 nt, synthetic construct
  source 1..23: mol_type = other RNA
  modified_base 1: mod_base = OTHER; note = 2'-O-methyladenosine-3'-phosphorothioate
  modified_base 2: mod_base = OTHER; note = 2'-deoxy-2'-fluoroadenosine-3'-phosphorothioate
  modified_base 3: mod_base = OTHER; note = 2'-O-methylguanosine-3'-phosphate
  modified_base 4: mod_base = OTHER; note = 2'-O-methyluridine-3'-phosphate
  modified_base 5: mod_base = OTHER; note = 2'-O-methyladenosine-3'-phosphate
  modified_base 6: mod_base = OTHER; note = 2'-deoxy-2'-fluoroguanosine-3'-phosphate
  modified_base 7: mod_base = OTHER; note = 2'-O-methyladenosine-3'-phosphate
  modified_base 8: mod_base = OTHER; note = 2'-deoxy-2'-fluoroadenosine-3'-phosphate
  modified_base 9: mod_base = OTHER; note = 2'-deoxy-2'-fluoroadenosine-3'-phosphate
  modified_base 10: mod_base = OTHER; note = 2'-O-methyladenosine-3'-phosphate
  modified_base 11: mod_base = OTHER; note = 2'-O-methylguanosine-3'-phosphate
  modified_base 12: mod_base = OTHER; note = 2'-O-methyluridine-3'-phosphate
  modified_base 13: mod_base = OTHER; note = 2'-O-methyladenosine-3'-phosphate
  modified_base 14: mod_base = OTHER; note = 2'-deoxy-2'-fluorocytidine-3'-phosphate
  modified_base 15: mod_base = OTHER; note = 2'-O-methyladenosine-3'-phosphate
  modified_base 16: mod_base = OTHER; note = 2'-deoxy-2'-fluoroguanosine-3'-phosphate
  modified_base 17: mod_base = OTHER; note = 2'-O-methylguanosine-3'-phosphate
  modified_base 18: mod_base = OTHER; note = 2'-O-methyluridine-3'-phosphate
  modified_base 19: mod_base = OTHER; note = 2'-O-methylcytidine-3'-phosphate
  modified_base 20: mod_base = OTHER; note = 2'-O-methyladenosine-3'-phosphate
  modified_base 21: mod_base = OTHER; note = 2'-O-methylcytidine-3'-phosphorothioate
  modified_base 22: mod_base = OTHER; note = 2'-O-methylcytidine-3'-phosphorothioate
  modified_base 23: mod_base = OTHER; note = 2'-O-methyladenosine
aagtagaaaagtacaggtcacca

SEQ ID NO: 1134 - RNA, 23 nt, synthetic construct
  source 1..23: mol_type = other RNA
  modified_base 1: mod_base = OTHER; note = 2'-O-methyladenosine-3'-phosphorothioate
  modified_base 2: mod_base = OTHER; note = 2'-deoxy-2'-fluoroadenosine-3'-phosphorothioate
  modified_base 3: mod_base = OTHER; note = 2'-O-methyluridine-3'-phosphate
  modified_base 4: mod_base = OTHER; note = 2'-O-methylguanosine-3'-phosphate
  modified_base 5: mod_base = OTHER; note = 2'-O-methyladenosine-3'-phosphate
  modified_base 6: mod_base = OTHER; note = 2'-deoxy-2'-fluorocytidine-3'-phosphate
  modified_base 7: mod_base = OTHER; note = 2'-O-methylcytidine-3'-phosphate
  modified_base 8: mod_base = OTHER; note = 2'-deoxy-2'-fluoroguanosine-3'-phosphate
  modified_base 9: mod_base = OTHER; note = 2'-deoxy-2'-fluorocytidine-3'-phosphate
  modified_base 10: mod_base = OTHER; note = 2'-O-methylcytidine-3'-phosphate
  modified_base 11: mod_base = OTHER; note = 2'-O-methyladenosine-3'-phosphate
  modified_base 12: mod_base = OTHER; note = 2'-O-methylguanosine-3'-phosphate
  modified_base 13: mod_base = OTHER; note = 2'-O-methyluridine-3'-phosphate
  modified_base 14: mod_base = OTHER; note = 2'-deoxy-2'-fluoroadenosine-3'-phosphate
  modified_base 15: mod_base = OTHER; note = 2'-O-methylguanosine-3'-phosphate
  modified_base 16: mod_base = OTHER; note = 2'-deoxy-2'-fluoroadenosine-3'-phosphate
  modified_base 17: mod_base = OTHER; note = 2'-O-methyladenosine-3'-phosphate
  modified_base 18: mod_base = OTHER; note = 2'-O-methyladenosine-3'-phosphate
  modified_base 19: mod_base = OTHER; note = 2'-O-methyladenosine-3'-phosphate
  modified_base 20: mod_base = OTHER; note = 2'-O-methylguanosine-3'-phosphate
  modified_base 21: mod_base = OTHER; note = 2'-O-methyluridine-3'-phosphorothioate
  modified_base 22: mod_base = OTHER; note = 2'-O-methyladenosine-3'-phosphorothioate
  modified_base 23: mod_base = OTHER; note = 2'-O-methylcytidine
aatgaccgccagtagaaaagtac

SEQ ID NO: 1135 - RNA, 23 nt, synthetic construct
  source 1..23: mol_type = other RNA
  modified_base 1: mod_base = OTHER; note = 2'-O-methyladenosine-3'-phosphorothioate
  modified_base 2: mod_base = OTHER; note = 2'-deoxy-2'-fluoroadenosine-3'-phosphorothioate
  modified_base 3: mod_base = OTHER; note = 2'-O-methylguanosine-3'-phosphate
  modified_base 4: mod_base = OTHER; note = 2'-O-methyladenosine-3'-phosphate
  modified_base 5: mod_base = OTHER; note = 2'-O-methyladenosine-3'-phosphate
  modified_base 6: mod_base = OTHER; note = 2'-deoxy-2'-fluoroguanosine-3'-phosphate
  modified_base 7: mod_base = OTHER; note = 2'-O-methyladenosine-3'-phosphate
  modified_base 8: mod_base = OTHER; note = 2'-deoxy-2'-fluorouridine-3'-phosphate
  modified_base 9: mod_base = OTHER; note = 2'-deoxy-2'-fluoroguanosine-3'-phosphate
  modified_base 10: mod_base = OTHER; note = 2'-O-methyladenosine-3'-phosphate
  modified_base 11: mod_base = OTHER; note = 2'-O-methylcytidine-3'-phosphate
  modified_base 12: mod_base = OTHER; note = 2'-O-methylcytidine-3'-phosphate
  modified_base 13: mod_base = OTHER; note = 2'-O-methylguanosine-3'-phosphate
  modified_base 14: mod_base = OTHER; note = 2'-deoxy-2'-fluorocytidine-3'-phosphate
  modified_base 15: mod_base = OTHER; note = 2'-O-methylcytidine-3'-phosphate
  modified_base 16: mod_base = OTHER; note = 2'-deoxy-2'-fluoroadenosine-3'-phosphate
  modified_base 17: mod_base = OTHER; note = 2'-O-methylguanosine-3'-phosphate
  modified_base 18: mod_base = OTHER; note = 2'-O-methyluridine-3'-phosphate
  modified_base 19: mod_base = OTHER; note = 2'-O-methyladenosine-3'-phosphate
  modified_base 20: mod_base = OTHER; note = 2'-O-methylguanosine-3'-phosphate
  modified_base 21: mod_base = OTHER; note = 2'-O-methyladenosine-3'-phosphorothioate
  modified_base 22: mod_base = OTHER; note = 2'-O-methyladenosine-3'-phosphorothioate
  modified_base 23: mod_base = OTHER; note = 2'-O-methyladenosine
aagaagatgaccgccagtagaaa

SEQ ID NO: 1136 - RNA, 23 nt, synthetic construct
  source 1..23: mol_type = other RNA
  modified_base 1: mod_base = OTHER; note = 2'-O-methyladenosine-3'-phosphorothioate
  modified_base 2: mod_base = OTHER; note = 2'-deoxy-2'-fluoroadenosine-3'-phosphorothioate
  modified_base 3: mod_base = OTHER; note = 2'-O-methyladenosine-3'-phosphate
  modified_base 4: mod_base = OTHER; note = 2'-O-methylcytidine-3'-phosphate
  modified_base 5: mod_base = OTHER; note = 2'-O-methylcytidine-3'-phosphate
  modified_base 6: mod_base = OTHER; note = 2'-deoxy-2'-fluorocytidine-3'-phosphate
  modified_base 7: mod_base = OTHER; note = 2'-O-methyladenosine-3'-phosphate
  modified_base 8: mod_base = OTHER; note = 2'-deoxy-2'-fluoroguanosine-3'-phosphate
  modified_base 9: mod_base = OTHER; note = 2'-deoxy-2'-fluoroguanosine-3'-phosphate
  modified_base 10: mod_base = OTHER; note = 2'-O-methylcytidine-3'-phosphate
  modified_base 11: mod_base = OTHER; note = 2'-O-methyladenosine-3'-phosphate
  modified_base 12: mod_base = OTHER; note = 2'-O-methylguanosine-3'-phosphate
  modified_base 13: mod_base = OTHER; note = 2'-O-methyladenosine-3'-phosphate
  modified_base 14: mod_base = OTHER; note = 2'-deoxy-2'-fluoroadenosine-3'-phosphate
  modified_base 15: mod_base = OTHER; note = 2'-O-methylguanosine-3'-phosphate
  modified_base 16: mod_base = OTHER; note = 2'-deoxy-2'-fluoroadenosine-3'-phosphate
  modified_base 17: mod_base = OTHER; note = 2'-O-methyluridine-3'-phosphate
  modified_base 18: mod_base = OTHER; note = 2'-O-methylguanosine-3'-phosphate
  modified_base 19: mod_base = OTHER; note = 2'-O-methyladenosine-3'-phosphate
  modified_base 20: mod_base = OTHER; note = 2'-O-methylcytidine-3'-phosphate
  modified_base 21: mod_base = OTHER; note = 2'-O-methylcytidine-3'-phosphorothioate
  modified_base 22: mod_base = OTHER; note = 2'-O-methylguanosine-3'-phosphorothioate
  modified_base 23: mod_base = OTHER; note = 2'-O-methylcytidine
aaacccaggcagaagatgaccgc

SEQ ID NO: 1137 - RNA, 23 nt, synthetic construct
  source 1..23: mol_type = other RNA
  modified_base 1: mod_base = OTHER; note = 2'-O-methyladenosine-3'-phosphorothioate
  modified_base 2: mod_base = OTHER; note = 2'-deoxy-2'-fluorocytidine-3'-phosphorothioate
  modified_base 3: mod_base = OTHER; note = 2'-O-methylcytidine-3'-phosphate
  modified_base 4: mod_base = OTHER; note = 2'-O-methyladenosine-3'-phosphate
  modified_base 5: mod_base = OTHER; note = 2'-O-methyluridine-3'-phosphate
  modified_base 6: mod_base = OTHER; note = 2'-deoxy-2'-fluoroadenosine-3'-phosphate
  modified_base 7: mod_base = OTHER; note = 2'-O-methylguanosine-3'-phosphate
  modified_base 8: mod_base = OTHER; note = 2'-deoxy-2'-fluoroguanosine-3'-phosphate
  modified_base 9: mod_base = OTHER; note = 2'-deoxy-2'-fluoroadenosine-3'-phosphate
  modified_base 10: mod_base = OTHER; note = 2'-O-methyladenosine-3'-phosphate
  modified_base 11: mod_base = OTHER; note = 2'-O-methylcytidine-3'-phosphate
  modified_base 12: mod_base = OTHER; note = 2'-O-methylcytidine-3'-phosphate
  modified_base 13: mod_base = OTHER; note = 2'-O-methylcytidine-3'-phosphate
  modified_base 14: mod_base = OTHER; note = 2'-deoxy-2'-fluoroadenosine-3'-phosphate
  modified_base 15: mod_base = OTHER; note = 2'-O-methylguanosine-3'-phosphate
  modified_base 16: mod_base = OTHER; note = 2'-deoxy-2'-fluoroguanosine-3'-phosphate
  modified_base 17: mod_base = OTHER; note = 2'-O-methylcytidine-3'-phosphate
  modified_base 18: mod_base = OTHER; note = 2'-O-methyladenosine-3'-phosphate
  modified_base 19: mod_base = OTHER; note = 2'-O-methylguanosine-3'-phosphate
  modified_base 20: mod_base = OTHER; note = 2'-O-methyladenosine-3'-phosphate
  modified_base 21: mod_base = OTHER; note = 2'-O-methyladenosine-3'-phosphorothioate
  modified_base 22: mod_base = OTHER; note = 2'-O-methylguanosine-3'-phosphorothioate
  modified_base 23: mod_base = OTHER; note = 2'-O-methyladenosine
accataggaacccaggcagaaga

SEQ ID NO: 1138 - RNA, 23 nt, synthetic construct
  source 1..23: mol_type = other RNA
  modified_base 1: mod_base = OTHER; note = 2'-O-methyladenosine-3'-phosphorothioate
  modified_base 2: mod_base = OTHER; note = 2'-deoxy-2'-fluoroadenosine-3'-phosphorothioate
  modified_base 3: mod_base = OTHER; note = 2'-O-methylguanosine-3'-phosphate
  modified_base 4: mod_base = OTHER; note = 2'-O-methyluridine-3'-phosphate
  modified_base 5: mod_base = OTHER; note = 2'-O-methyluridine-3'-phosphate
  modified_base 6: mod_base = OTHER; note = 2'-deoxy-2'-fluoroguanosine-3'-phosphate
  modified_base 7: mod_base = OTHER; note = 2'-O-methylcytidine-3'-phosphate
  modified_base 8: mod_base = OTHER; note = 2'-deoxy-2'-fluorocytidine-3'-phosphate
  modified_base 9: mod_base = OTHER; note = 2'-deoxy-2'-fluoroadenosine-3'-phosphate
  modified_base 10: mod_base = OTHER; note = 2'-O-methyluridine-3'-phosphate
  modified_base 11: mod_base = OTHER; note = 2'-O-methyladenosine-3'-phosphate
  modified_base 12: mod_base = OTHER; note = 2'-O-methylguanosine-3'-phosphate
  modified_base 13: mod_base = OTHER; note = 2'-O-methylguanosine-3'-phosphate
  modified_base 14: mod_base = OTHER; note = 2'-deoxy-2'-fluoroadenosine-3'-phosphate
  modified_base 15: mod_base = OTHER; note = 2'-O-methyladenosine-3'-phosphate
  modified_base 16: mod_base = OTHER; note = 2'-deoxy-2'-fluorocytidine-3'-phosphate
  modified_base 17: mod_base = OTHER; note = 2'-O-methylcytidine-3'-phosphate
  modified_base 18: mod_base = OTHER; note = 2'-O-methylcytidine-3'-phosphate
  modified_base 19: mod_base = OTHER; note = 2'-O-methyladenosine-3'-phosphate
  modified_base 20: mod_base = OTHER; note = 2'-O-methylguanosine-3'-phosphate
  modified_base 21: mod_base = OTHER; note = 2'-O-methylguanosine-3'-phosphorothioate
  modified_base 22: mod_base = OTHER; note = 2'-O-methylcytidine-3'-phosphorothioate
  modified_base 23: mod_base = OTHER; note = 2'-O-methyladenosine
aagttgccataggaacccaggca

SEQ ID NO: 1139 - RNA, 23 nt, synthetic construct
  source 1..23: mol_type = other RNA
  modified_base 1: mod_base = OTHER; note = 2'-O-methyladenosine-3'-phosphorothioate
  modified_base 2: mod_base = OTHER; note = 2'-deoxy-2'-fluoroadenosine-3'-phosphorothioate
  modified_base 3: mod_base = OTHER; note = 2'-O-methyladenosine-3'-phosphate
  modified_base 4: mod_base = OTHER; note = 2'-O-methyluridine-3'-phosphate
  modified_base 5: mod_base = OTHER; note = 2'-O-methylguanosine-3'-phosphate
  modified_base 6: mod_base = OTHER; note = 2'-deoxy-2'-fluoroadenosine-3'-phosphate
  modified_base 7: mod_base = OTHER; note = 2'-O-methyladenosine-3'-phosphate
  modified_base 8: mod_base = OTHER; note = 2'-deoxy-2'-fluoroguanosine-3'-phosphate
  modified_base 9: mod_base = OTHER; note = 2'-deoxy-2'-fluorouridine-3'-phosphate
  modified_base 10: mod_base = OTHER; note = 2'-O-methyluridine-3'-phosphate
  modified_base 11: mod_base = OTHER; note = 2'-O-methylguanosine-3'-phosphate
  modified_base 12: mod_base = OTHER; note = 2'-O-methylcytidine-3'-phosphate
  modified_base 13: mod_base = OTHER; note = 2'-O-methylcytidine-3'-phosphate
  modified_base 14: mod_base = OTHER; note = 2'-deoxy-2'-fluoroadenosine-3'-phosphate
  modified_base 15: mod_base = OTHER; note = 2'-O-methyluridine-3'-phosphate
  modified_base 16: mod_base = OTHER; note = 2'-deoxy-2'-fluoroadenosine-3'-phosphate
  modified_base 17: mod_base = OTHER; note = 2'-O-methylguanosine-3'-phosphate
  modified_base 18: mod_base = OTHER; note = 2'-O-methylguanosine-3'-phosphate
  modified_base 19: mod_base = OTHER; note = 2'-O-methyladenosine-3'-phosphate
  modified_base 20: mod_base = OTHER; note = 2'-O-methyladenosine-3'-phosphate
  modified_base 21: mod_base = OTHER; note = 2'-O-methylcytidine-3'-phosphorothioate
  modified_base 22: mod_base = OTHER; note = 2'-O-methylcytidine-3'-phosphorothioate
  modified_base 23: mod_base = OTHER; note = 2'-O-methylcytidine
aaatgaagttgccataggaaccc

SEQ ID NO: 1140 - RNA, 23 nt, synthetic construct
  source 1..23: mol_type = other RNA
  modified_base 1: mod_base = OTHER; note = 2'-O-methyladenosine-3'-phosphorothioate
  modified_base 2: mod_base = OTHER; note = 2'-deoxy-2'-fluoroadenosine-3'-phosphorothioate
  modified_base 3: mod_base = OTHER; note = 2'-O-methyladenosine-3'-phosphate
  modified_base 4: mod_base = OTHER; note = 2'-O-methylguanosine-3'-phosphate
  modified_base 5: mod_base = OTHER; note = 2'-O-methyladenosine-3'-phosphate
  modified_base 6: mod_base = OTHER; note = 2'-deoxy-2'-fluorocytidine-3'-phosphate
  modified_base 7: mod_base = OTHER; note = 2'-O-methyladenosine-3'-phosphate
  modified_base 8: mod_base = OTHER; note = 2'-deoxy-2'-fluoroadenosine-3'-phosphate
  modified_base 9: mod_base = OTHER; note = 2'-deoxy-2'-fluorouridine-3'-phosphate
  modified_base 10: mod_base = OTHER; note = 2'-O-methylguanosine-3'-phosphate
  modified_base 11: mod_base = OTHER; note = 2'-O-methyladenosine-3'-phosphate
  modified_base 12: mod_base = OTHER; note = 2'-O-methyladenosine-3'-phosphate
  modified_base 13: mod_base = OTHER; note = 2'-O-methylguanosine-3'-phosphate
  modified_base 14: mod_base = OTHER; note = 2'-deoxy-2'-fluorouridine-3'-phosphate
  modified_base 15: mod_base = OTHER; note = 2'-O-methyluridine-3'-phosphate
  modified_base 16: mod_base = OTHER; note = 2'-deoxy-2'-fluoroguanosine-3'-phosphate
  modified_base 17: mod_base = OTHER; note = 2'-O-methylcytidine-3'-phosphate
  modified_base 18: mod_base = OTHER; note = 2'-O-methylcytidine-3'-phosphate
  modified_base 19: mod_base = OTHER; note = 2'-O-methyladenosine-3'-phosphate
  modified_base 20: mod_base = OTHER; note = 2'-O-methyluridine-3'-phosphate
  modified_base 21: mod_base = OTHER; note = 2'-O-methyladenosine-3'-phosphorothioate
  modified_base 22: mod_base = OTHER; note = 2'-O-methylguanosine-3'-phosphorothioate
  modified_base 23: mod_base = OTHER; note = 2'-O-methylguanosine
aaagacaatgaagttgccatagg

SEQ ID NO: 1141 - RNA, 23 nt, synthetic construct
  source 1..23: mol_type = other RNA
  modified_base 1: mod_base = OTHER; note = 2'-O-methyladenosine-3'-phosphorothioate
  modified_base 2: mod_base = OTHER; note = 2'-deoxy-2'-fluoroadenosine-3'-phosphorothioate
  modified_base 3: mod_base = OTHER; note = 2'-O-methylcytidine-3'-phosphate
  modified_base 4: mod_base = OTHER; note = 2'-O-methyladenosine-3'-phosphate
  modified_base 5: mod_base = OTHER; note = 2'-O-methyladenosine-3'-phosphate
  modified_base 6: mod_base = OTHER; note = 2'-deoxy-2'-fluoroguanosine-3'-phosphate
  modified_base 7: mod_base = OTHER; note = 2'-O-methyladenosine-3'-phosphate
  modified_base 8: mod_base = OTHER; note = 2'-deoxy-2'-fluoroadenosine-3'-phosphate
  modified_base 9: mod_base = OTHER; note = 2'-deoxy-2'-fluoroguanosine-3'-phosphate
  modified_base 10: mod_base = OTHER; note = 2'-O-methyladenosine-3'-phosphate
  modified_base 11: mod_base = OTHER; note = 2'-O-methylcytidine-3'-phosphate
  modified_base 12: mod_base = OTHER; note = 2'-O-methyladenosine-3'-phosphate
  modified_base 13: mod_base = OTHER; note = 2'-O-methyladenosine-3'-phosphate
  modified_base 14: mod_base = OTHER; note = 2'-deoxy-2'-fluorouridine-3'-phosphate
  modified_base 15: mod_base = OTHER; note = 2'-O-methylguanosine-3'-phosphate
  modified_base 16: mod_base = OTHER; note = 2'-deoxy-2'-fluoroadenosine-3'-phosphate
  modified_base 17: mod_base = OTHER; note = 2'-O-methyladenosine-3'-phosphate
  modified_base 18: mod_base = OTHER; note = 2'-O-methylguanosine-3'-phosphate
  modified_base 19: mod_base = OTHER; note = 2'-O-methyluridine-3'-phosphate
  modified_base 20: mod_base = OTHER; note = 2'-O-methyluridine-3'-phosphate
  modified_base 21: mod_base = OTHER; note = 2'-O-methylguanosine-3'-phosphorothioate
  modified_base 22: mod_base = OTHER; note = 2'-O-methylcytidine-3'-phosphorothioate
  modified_base 23: mod_base = OTHER; note = 2'-O-methylcytidine
aacaagaagacaatgaagttgcc

SEQ ID NO: 1142 - RNA, 23 nt, synthetic construct
  source 1..23: mol_type = other RNA
  modified_base 1: mod_base = OTHER; note = 2'-O-methyladenosine-3'-phosphorothioate
  modified_base 2: mod_base = OTHER; note = 2'-deoxy-2'-fluoroguanosine-3'-phosphorothioate
  modified_base 3: mod_base = OTHER; note = 2'-O-methyladenosine-3'-phosphate
  modified_base 4: mod_base = OTHER; note = 2'-O-methyladenosine-3'-phosphate
  modified_base 5: mod_base = OTHER; note = 2'-O-methylguanosine-3'-phosphate
  modified_base 6: mod_base = OTHER; note = 2'-deoxy-2'-fluoroguanosine-3'-phosphate
  modified_base 7: mod_base = OTHER; note = 2'-O-methyladenosine-3'-phosphate
  modified_base 8: mod_base = OTHER; note = 2'-deoxy-2'-fluorocytidine-3'-phosphate
  modified_base 9: mod_base = OTHER; note = 2'-deoxy-2'-fluoroadenosine-3'-phosphate
  modified_base 10: mod_base = OTHER; note = 2'-O-methyladenosine-3'-phosphate
  modified_base 11: mod_base = OTHER; note = 2'-O-methylguanosine-3'-phosphate
  modified_base 12: mod_base = OTHER; note = 2'-O-methyladenosine-3'-phosphate
  modified_base 13: mod_base = OTHER; note = 2'-O-methyladenosine-3'-phosphate
  modified_base 14: mod_base = OTHER; note = 2'-deoxy-2'-fluoroguanosine-3'-phosphate
  modified_base 15: mod_base = OTHER; note = 2'-O-methyladenosine-3'-phosphate
  modified_base 16: mod_base = OTHER; note = 2'-deoxy-2'-fluorocytidine-3'-phosphate
  modified_base 17: mod_base = OTHER; note = 2'-O-methyladenosine-3'-phosphate
  modified_base 18: mod_base = OTHER; note = 2'-O-methyladenosine-3'-phosphate
  modified_base 19: mod_base = OTHER; note = 2'-O-methyluridine-3'-phosphate
  modified_base 20: mod_base = OTHER; note = 2'-O-methylguanosine-3'-phosphate
  modified_base 21: mod_base = OTHER; note = 2'-O-methyladenosine-3'-phosphorothioate
  modified_base 22: mod_base = OTHER; note = 2'-O-methyladenosine-3'-phosphorothioate
  modified_base 23: mod_base = OTHER; note = 2'-O-methylguanosine
agaaggacaagaagacaatgaag

SEQ ID NO: 1143 - RNA, 23 nt, synthetic construct
  source 1..23: mol_type = other RNA
  modified_base 1: mod_base = OTHER; note = 2'-O-methyladenosine-3'-phosphorothioate
  modified_base 2: mod_base = OTHER; note = 2'-deoxy-2'-fluorouridine-3'-phosphorothioate
  modified_base 3: mod_base = OTHER; note = 2'-O-methylcytidine-3'-phosphate
  modified_base 4: mod_base = OTHER; note = 2'-O-methylguanosine-3'-phosphate
  modified_base 5: mod_base = OTHER; note = 2'-O-methyladenosine-3'-phosphate
  modified_base 6: mod_base = OTHER; note = 2'-deoxy-2'-fluoroadenosine-3'-phosphate
  modified_base 7: mod_base = OTHER; note = 2'-O-methylguanosine-3'-phosphate
  modified_base 8: mod_base = OTHER; note = 2'-deoxy-2'-fluoroadenosine-3'-phosphate
  modified_base 9: mod_base = OTHER; note = 2'-deoxy-2'-fluoroadenosine-3'-phosphate
  modified_base 10: mod_base = OTHER; note = 2'-O-methylguanosine-3'-phosphate
  modified_base 11: mod_base = OTHER; note = 2'-O-methylguanosine-3'-phosphate
  modified_base 12: mod_base = OTHER; note = 2'-O-methyladenosine-3'-phosphate
  modified_base 13: mod_base = OTHER; note = 2'-O-methylcytidine-3'-phosphate
  modified_base 14: mod_base = OTHER; note = 2'-deoxy-2'-fluoroadenosine-3'-phosphate
  modified_base 15: mod_base = OTHER; note = 2'-O-methyladenosine-3'-phosphate
  modified_base 16: mod_base = OTHER; note = 2'-deoxy-2'-fluoroguanosine-3'-phosphate
  modified_base 17: mod_base = OTHER; note = 2'-O-methyladenosine-3'-phosphate
  modified_base 18: mod_base = OTHER; note = 2'-O-methyladenosine-3'-phosphate
  modified_base 19: mod_base = OTHER; note = 2'-O-methylguanosine-3'-phosphate
  modified_base 20: mod_base = OTHER; note = 2'-O-methyladenosine-3'-phosphate
  modified_base 21: mod_base = OTHER; note = 2'-O-methylcytidine-3'-phosphorothioate
  modified_base 22: mod_base = OTHER; note = 2'-O-methyladenosine-3'-phosphorothioate
  modified_base 23: mod_base = OTHER; note = 2'-O-methyladenosine
atcgaagaaggacaagaagacaa

SEQ ID NO: 1144 - RNA, 23 nt, synthetic construct
  source 1..23: mol_type = other RNA
  modified_base 1: mod_base = OTHER; note = 2'-O-methyladenosine-3'-phosphorothioate
  modified_base 2: mod_base = OTHER; note = 2'-deoxy-2'-fluorocytidine-3'-phosphorothioate
  modified_base 3: mod_base = OTHER; note = 2'-O-methyluridine-3'-phosphate
  modified_base 4: mod_base = OTHER; note = 2'-O-methylguanosine-3'-phosphate
  modified_base 5: mod_base = OTHER; note = 2'-O-methylguanosine-3'-phosphate
  modified_base 6: mod_base = OTHER; note = 2'-deoxy-2'-fluoroadenosine-3'-phosphate
  modified_base 7: mod_base = OTHER; note = 2'-O-methyluridine-3'-phosphate
  modified_base 8: mod_base = OTHER; note = 2'-deoxy-2'-fluorocytidine-3'-phosphate
  modified_base 9: mod_base = OTHER; note = 2'-deoxy-2'-fluoroguanosine-3'-phosphate
  modified_base 10: mod_base = OTHER; note = 2'-O-methyladenosine-3'-phosphate
  modified_base 11: mod_base = OTHER; note = 2'-O-methyladenosine-3'-phosphate
  modified_base 12: mod_base = OTHER; note = 2'-O-methylguanosine-3'-phosphate
  modified_base 13: mod_base = OTHER; note = 2'-O-methyladenosine-3'-phosphate
  modified_base 14: mod_base = OTHER; note = 2'-deoxy-2'-fluoroadenosine-3'-phosphate
  modified_base 15: mod_base = OTHER; note = 2'-O-methylguanosine-3'-phosphate
  modified_base 16: mod_base = OTHER; note = 2'-deoxy-2'-fluoroguanosine-3'-phosphate
  modified_base 17: mod_base = OTHER; note = 2'-O-methyladenosine-3'-phosphate
  modified_base 18: mod_base = OTHER; note = 2'-O-methylcytidine-3'-phosphate
  modified_base 19: mod_base = OTHER; note = 2'-O-methyladenosine-3'-phosphate
  modified_base 20: mod_base = OTHER; note = 2'-O-methyladenosine-3'-phosphate
  modified_base 21: mod_base = OTHER; note = 2'-O-methylguanosine-3'-phosphorothioate
  modified_base 22: mod_base = OTHER; note = 2'-O-methyladenosine-3'-phosphorothioate
  modified_base 23: mod_base = OTHER; note = 2'-O-methyladenosine
actggatcgaagaaggacaagaa

SEQ ID NO: 1145 - RNA, 23 nt, synthetic construct
  source 1..23: mol_type = other RNA
  modified_base 1: mod_base = OTHER; note = 2'-O-methyladenosine-3'-phosphorothioate
  modified_base 2: mod_base = OTHER; note = 2'-deoxy-2'-fluoroguanosine-3'-phosphorothioate
  modified_base 3: mod_base = OTHER; note = 2'-O-methyladenosine-3'-phosphate
  modified_base 4: mod_base = OTHER; note = 2'-O-methyladenosine-3'-phosphate
  modified_base 5: mod_base = OTHER; note = 2'-O-methylguanosine-3'-phosphate
  modified_base 6: mod_base = OTHER; note = 2'-deoxy-2'-fluoroguanosine-3'-phosphate
  modified_base 7: mod_base = OTHER; note = 2'-O-methylcytidine-3'-phosphate
  modified_base 8: mod_base = OTHER; note = 2'-deoxy-2'-fluorouridine-3'-phosphate
  modified_base 9: mod_base = OTHER; note = 2'-deoxy-2'-fluoroguanosine-3'-phosphate
  modified_base 10: mod_base = OTHER; note = 2'-O-methylguanosine-3'-phosphate
  modified_base 11: mod_base = OTHER; note = 2'-O-methyladenosine-3'-phosphate
  modified_base 12: mod_base = OTHER; note = 2'-O-methyluridine-3'-phosphate
  modified_base 13: mod_base = OTHER; note = 2'-O-methylcytidine-3'-phosphate
  modified_base 14: mod_base = OTHER; note = 2'-deoxy-2'-fluoroguanosine-3'-phosphate
  modified_base 15: mod_base = OTHER; note = 2'-O-methyladenosine-3'-phosphate
  modified_base 16: mod_base = OTHER; note = 2'-deoxy-2'-fluoroadenosine-3'-phosphate
  modified_base 17: mod_base = OTHER; note = 2'-O-methylguanosine-3'-phosphate
  modified_base 18: mod_base = OTHER; note = 2'-O-methyladenosine-3'-phosphate
  modified_base 19: mod_base = OTHER; note = 2'-O-methyladenosine-3'-phosphate
  modified_base 20: mod_base = OTHER; note = 2'-O-methylguanosine-3'-phosphate
  modified_base 21: mod_base = OTHER; note = 2'-O-methylguanosine-3'-phosphorothioate
  modified_base 22: mod_base = OTHER; note = 2'-O-methyladenosine-3'-phosphorothioate
  modified_base 23: mod_base = OTHER; note = 2'-O-methylcytidine
agaaggctggatcgaagaaggac

SEQ ID NO: 1146 - RNA, 23 nt, synthetic construct
  source 1..23: mol_type = other RNA
  modified_base 1: mod_base = OTHER; note = 2'-O-methyladenosine-3'-phosphorothioate
  modified_base 2: mod_base = OTHER; note = 2'-deoxy-2'-fluoroadenosine-3'-phosphorothioate
  modified_base 3: mod_base = OTHER; note = 2'-O-methyladenosine-3'-phosphate
  modified_base 4: mod_base = OTHER; note = 2'-O-methyluridine-3'-phosphate
  modified_base 5: mod_base = OTHER; note = 2'-O-methyluridine-3'-phosphate
  modified_base 6: mod_base = OTHER; note = 2'-deoxy-2'-fluorouridine-3'-phosphate
  modified_base 7: mod_base = OTHER; note = 2'-O-methylcytidine-3'-phosphate
  modified_base 8: mod_base = OTHER; note = 2'-deoxy-2'-fluorocytidine-3'-phosphate
  modified_base 9: mod_base = OTHER; note = 2'-deoxy-2'-fluorouridine-3'-phosphate
  modified_base 10: mod_base = OTHER; note = 2'-O-methylguanosine-3'-phosphate
  modified_base 11: mod_base = OTHER; note = 2'-O-methyladenosine-3'-phosphate
  modified_base 12: mod_base = OTHER; note = 2'-O-methyladenosine-3'-phosphate
  modified_base 13: mod_base = OTHER; note = 2'-O-methylguanosine-3'-phosphate
  modified_base 14: mod_base = OTHER; note = 2'-deoxy-2'-fluoroguanosine-3'-phosphate
  modified_base 15: mod_base = OTHER; note = 2'-O-methylcytidine-3'-phosphate
  modified_base 16: mod_base = OTHER; note = 2'-deoxy-2'-fluorouridine-3'-phosphate
  modified_base 17: mod_base = OTHER; note = 2'-O-methylguanosine-3'-phosphate
  modified_base 18: mod_base = OTHER; note = 2'-O-methylguanosine-3'-phosphate
  modified_base 19: mod_base = OTHER; note = 2'-O-methyladenosine-3'-phosphate
  modified_base 20: mod_base = OTHER; note = 2'-O-methyluridine-3'-phosphate
  modified_base 21: mod_base = OTHER; note = 2'-O-methylcytidine-3'-phosphorothioate
  modified_base 22: mod_base = OTHER; note = 2'-O-methylguanosine-3'-phosphorothioate
  modified_base 23: mod_base = OTHER; note = 2'-O-methyladenosine
aaatttcctgaaggctggatcga

SEQ ID NO: 1147 - RNA, 23 nt, synthetic construct
  source 1..23: mol_type = other RNA
  modified_base 1: mod_base = OTHER; note = 2'-O-methyladenosine-3'-phosphorothioate
  modified_base 2: mod_base = OTHER; note = 2'-deoxy-2'-fluorouridine-3'-phosphorothioate
  modified_base 3: mod_base = OTHER; note = 2'-O-methyluridine-3'-phosphate
  modified_base 4: mod_base = OTHER; note = 2'-O-methylcytidine-3'-phosphate
  modified_base 5: mod_base = OTHER; note = 2'-O-methyluridine-3'-phosphate
  modified_base 6: mod_base = OTHER; note = 2'-deoxy-2'-fluoroguanosine-3'-phosphate
  modified_base 7: mod_base = OTHER; note = 2'-O-methyladenosine-3'-phosphate
  modified_base 8: mod_base = OTHER; note = 2'-deoxy-2'-fluoroadenosine-3'-phosphate
  modified_base 9: mod_base = OTHER; note = 2'-deoxy-2'-fluorouridine-3'-phosphate
  modified_base 10: mod_base = OTHER; note = 2'-O-methyluridine-3'-phosphate
  modified_base 11: mod_base = OTHER; note = 2'-O-methyluridine-3'-phosphate
  modified_base 12: mod_base = OTHER; note = 2'-O-methylcytidine-3'-phosphate
  modified_base 13: mod_base = OTHER; note = 2'-O-methylcytidine-3'-phosphate
  modified_base 14: mod_base = OTHER; note = 2'-deoxy-2'-fluorouridine-3'-phosphate
  modified_base 15: mod_base = OTHER; note = 2'-O-methylguanosine-3'-phosphate
  modified_base 16: mod_base = OTHER; note = 2'-deoxy-2'-fluoroadenosine-3'-phosphate
  modified_base 17: mod_base = OTHER; note = 2'-O-methyladenosine-3'-phosphate
  modified_base 18: mod_base = OTHER; note = 2'-O-methylguanosine-3'-phosphate
  modified_base 19: mod_base = OTHER; note = 2'-O-methylguanosine-3'-phosphate
  modified_base 20: mod_base = OTHER; note = 2'-O-methylcytidine-3'-phosphate
  modified_base 21: mod_base = OTHER; note = 2'-O-methyluridine-3'-phosphorothioate
  modified_base 22: mod_base = OTHER; note = 2'-O-methylguanosine-3'-phosphorothioate
  modified_base 23: mod_base = OTHER; note = 2'-O-methylguanosine
attctgaatttcctgaaggctgg

SEQ ID NO: 1148 - RNA, 23 nt, synthetic construct
  source 1..23: mol_type = other RNA
  modified_base 1: mod_base = OTHER; note = 2'-O-methyladenosine-3'-phosphorothioate
  modified_base 2: mod_base = OTHER; note = 2'-deoxy-2'-fluoroguanosine-3'-phosphorothioate
  modified_base 3: mod_base = OTHER; note = 2'-O-methyluridine-3'-phosphate
  modified_base 4: mod_base = OTHER; note = 2'-O-methyluridine-3'-phosphate
  modified_base 5: mod_base = OTHER; note = 2'-O-methylguanosine-3'-phosphate
  modified_base 6: mod_base = OTHER; note = 2'-deoxy-2'-fluoroguanosine-3'-phosphate
  modified_base 7: mod_base = OTHER; note = 2'-O-methyluridine-3'-phosphate
  modified_base 8: mod_base = OTHER; note = 2'-deoxy-2'-fluorouridine-3'-phosphate
  modified_base 9: mod_base = OTHER; note = 2'-deoxy-2'-fluorocytidine-3'-phosphate
  modified_base 10: mod_base = OTHER; note = 2'-O-methyluridine-3'-phosphate
  modified_base 11: mod_base = OTHER; note = 2'-O-methylguanosine-3'-phosphate
  modified_base 12: mod_base = OTHER; note = 2'-O-methyladenosine-3'-phosphate
  modified_base 13: mod_base = OTHER; note = 2'-O-methyladenosine-3'-phosphate
  modified_base 14: mod_base = OTHER; note = 2'-deoxy-2'-fluorouridine-3'-phosphate
  modified_base 15: mod_base = OTHER; note = 2'-O-methyluridine-3'-phosphate
  modified_base 16: mod_base = OTHER; note = 2'-deoxy-2'-fluorouridine-3'-phosphate
  modified_base 17: mod_base = OTHER; note = 2'-O-methylcytidine-3'-phosphate
  modified_base 18: mod_base = OTHER; note = 2'-O-methylcytidine-3'-phosphate
  modified_base 19: mod_base = OTHER; note = 2'-O-methyluridine-3'-phosphate
  modified_base 20: mod_base = OTHER; note = 2'-O-methylguanosine-3'-phosphate
  modified_base 21: mod_base = OTHER; note = 2'-O-methyladenosine-3'-phosphorothioate
  modified_base 22: mod_base = OTHER; note = 2'-O-methyladenosine-3'-phosphorothioate
  modified_base 23: mod_base = OTHER; note = 2'-O-methylguanosine
agttggttctgaatttcctgaag

SEQ ID NO: 1149 - RNA, 23 nt, synthetic construct
  source 1..23: mol_type = other RNA
  modified_base 1: mod_base = OTHER; note = 2'-O-methyladenosine-3'-phosphorothioate
  modified_base 2: mod_base = OTHER; note = 2'-deoxy-2'-fluoroadenosine-3'-phosphorothioate
  modified_base 3: mod_base = OTHER; note = 2'-O-methyladenosine-3'-phosphate
  modified_base 4: mod_base = OTHER; note = 2'-O-methyluridine-3'-phosphate
  modified_base 5: mod_base = OTHER; note = 2'-O-methylcytidine-3'-phosphate
  modified_base 6: mod_base = OTHER; note = 2'-deoxy-2'-fluoroadenosine-3'-phosphate
  modified_base 7: mod_base = OTHER; note = 2'-O-methyladenosine-3'-phosphate
  modified_base 8: mod_base = OTHER; note = 2'-deoxy-2'-fluoroadenosine-3'-phosphate
  modified_base 9: mod_base = OTHER; note = 2'-deoxy-2'-fluoroguanosine-3'-phosphate
  modified_base 10: mod_base = OTHER; note = 2'-O-methyluridine-3'-phosphate
  modified_base 11: mod_base = OTHER; note = 2'-O-methyluridine-3'-phosphate
  modified_base 12: mod_base = OTHER; note = 2'-O-methylguanosine-3'-phosphate
  modified_base 13: mod_base = OTHER; note = 2'-O-methylguanosine-3'-phosphate
  modified_base 14: mod_base = OTHER; note = 2'-deoxy-2'-fluorouridine-3'-phosphate
  modified_base 15: mod_base = OTHER; note = 2'-O-methyluridine-3'-phosphate
  modified_base 16: mod_base = OTHER; note = 2'-deoxy-2'-fluorocytidine-3'-phosphate
  modified_base 17: mod_base = OTHER; note = 2'-O-methyluridine-3'-phosphate
  modified_base 18: mod_base = OTHER; note = 2'-O-methylguanosine-3'-phosphate
  modified_base 19: mod_base = OTHER; note = 2'-O-methyladenosine-3'-phosphate
  modified_base 20: mod_base = OTHER; note = 2'-O-methyladenosine-3'-phosphate
  modified_base 21: mod_base = OTHER; note = 2'-O-methyluridine-3'-phosphorothioate
  modified_base 22: mod_base = OTHER; note = 2'-O-methyluridine-3'-phosphorothioate
  modified_base 23: mod_base = OTHER; note = 2'-O-methyluridine
aaatcaaagttggttctgaattt

SEQ ID NO: 1150 - RNA, 23 nt, synthetic construct
  source 1..23: mol_type = other RNA
  modified_base 1: mod_base = OTHER; note = 2'-O-methyladenosine-3'-phosphorothioate
  modified_base 2: mod_base = OTHER; note = 2'-deoxy-2'-fluorouridine-3'-phosphorothioate
  modified_base 3: mod_base = OTHER; note = 2'-O-methylcytidine-3'-phosphate
  modified_base 4: mod_base = OTHER; note = 2'-O-methyladenosine-3'-phosphate
  modified_base 5: mod_base = OTHER; note = 2'-O-methyluridine-3'-phosphate
  modified_base 6: mod_base = OTHER; note = 2'-deoxy-2'-fluoroguanosine-3'-phosphate
  modified_base 7: mod_base = OTHER; note = 2'-O-methyladenosine-3'-phosphate
  modified_base 8: mod_base = OTHER; note = 2'-deoxy-2'-fluoroadenosine-3'-phosphate
  modified_base 9: mod_base = OTHER; note = 2'-deoxy-2'-fluoroadenosine-3'-phosphate
  modified_base 10: mod_base = OTHER; note = 2'-O-methyluridine-3'-phosphate
  modified_base 11: mod_base = OTHER; note = 2'-O-methylcytidine-3'-phosphate
  modified_base 12: mod_base = OTHER; note = 2'-O-methyladenosine-3'-phosphate
  modified_base 13: mod_base = OTHER; note = 2'-O-methyladenosine-3'-phosphate
  modified_base 14: mod_base = OTHER; note = 2'-deoxy-2'-fluoroadenosine-3'-phosphate
  modified_base 15: mod_base = OTHER; note = 2'-O-methylguanosine-3'-phosphate
  modified_base 16: mod_base = OTHER; note = 2'-deoxy-2'-fluorouridine-3'-phosphate
  modified_base 17: mod_base = OTHER; note = 2'-O-methyluridine-3'-phosphate
  modified_base 18: mod_base = OTHER; note = 2'-O-methylguanosine-3'-phosphate
  modified_base 19: mod_base = OTHER; note = 2'-O-methylguanosine-3'-phosphate
  modified_base 20: mod_base = OTHER; note = 2'-O-methyluridine-3'-phosphate
  modified_base 21: mod_base = OTHER; note = 2'-O-methyluridine-3'-phosphorothioate
  modified_base 22: mod_base = OTHER; note = 2'-O-methylcytidine-3'-phosphorothioate
  modified_base 23: mod_base = OTHER; note = 2'-O-methyluridine
atcatgaaatcaaagttggttct

SEQ ID NO: 1151 - RNA, 23 nt, synthetic construct
  source 1..23: mol_type = other RNA
  modified_base 1: mod_base = OTHER; note = 2'-O-methyladenosine-3'-phosphorothioate
  modified_base 2: mod_base = OTHER; note = 2'-deoxy-2'-fluorouridine-3'-phosphorothioate
  modified_base 3: mod_base = OTHER; note = 2'-O-methyluridine-3'-phosphate
  modified_base 4: mod_base = OTHER; note = 2'-O-methylcytidine-3'-phosphate
  modified_base 5: mod_base = OTHER; note = 2'-O-methyladenosine-3'-phosphate
  modified_base 6: mod_base = OTHER; note = 2'-deoxy-2'-fluoroguanosine-3'-phosphate
  modified_base 7: mod_base = OTHER; note = 2'-O-methylguanosine-3'-phosphate
  modified_base 8: mod_base = OTHER; note = 2'-deoxy-2'-fluoroadenosine-3'-phosphate
  modified_base 9: mod_base = OTHER; note = 2'-deoxy-2'-fluorouridine-3'-phosphate
  modified_base 10: mod_base = OTHER; note = 2'-O-methylcytidine-3'-phosphate
  modified_base 11: mod_base = OTHER; note = 2'-O-methyladenosine-3'-phosphate
  modified_base 12: mod_base = OTHER; note = 2'-O-methyluridine-3'-phosphate
  modified_base 13: mod_base = OTHER; note = 2'-O-methylguanosine-3'-phosphate
  modified_base 14: mod_base = OTHER; note = 2'-deoxy-2'-fluoroadenosine-3'-phosphate
  modified_base 15: mod_base = OTHER; note = 2'-O-methyladenosine-3'-phosphate
  modified_base 16: mod_base = OTHER; note = 2'-deoxy-2'-fluoroadenosine-3'-phosphate
  modified_base 17: mod_base = OTHER; note = 2'-O-methyluridine-3'-phosphate
  modified_base 18: mod_base = OTHER; note = 2'-O-methylcytidine-3'-phosphate
  modified_base 19: mod_base = OTHER; note = 2'-O-methyladenosine-3'-phosphate
  modified_base 20: mod_base = OTHER; note = 2'-O-methyladenosine-3'-phosphate
  modified_base 21: mod_base = OTHER; note = 2'-O-methyladenosine-3'-phosphorothioate
  modified_base 22: mod_base = OTHER; note = 2'-O-methylguanosine-3'-phosphorothioate
  modified_base 23: mod_base = OTHER; note = 2'-O-methyluridine
attcaggatcatgaaatcaaagt

SEQ ID NO: 1152 - RNA, 23 nt, synthetic construct
  source 1..23: mol_type = other RNA
  modified_base 1: mod_base = OTHER; note = 2'-O-methyladenosine-3'-phosphorothioate
  modified_base 2: mod_base = OTHER; note = 2'-deoxy-2'-fluoroguanosine-3'-phosphorothioate
  modified_base 3: mod_base = OTHER; note = 2'-O-methyladenosine-3'-phosphate
  modified_base 4: mod_base = OTHER; note = 2'-O-methylcytidine-3'-phosphate
  modified_base 5: mod_base = OTHER; note = 2'-O-methyladenosine-3'-phosphate
  modified_base 6: mod_base = OTHER; note = 2'-deoxy-2'-fluoroguanosine-3'-phosphate
  modified_base 7: mod_base = OTHER; note = 2'-O-methylguanosine-3'-phosphate
  modified_base 8: mod_base = OTHER; note = 2'-deoxy-2'-fluorouridine-3'-phosphate
  modified_base 9: mod_base = OTHER; note = 2'-deoxy-2'-fluorouridine-3'-phosphate
  modified_base 10: mod_base = OTHER; note = 2'-O-methylcytidine-3'-phosphate
  modified_base 11: mod_base = OTHER; note = 2'-O-methyladenosine-3'-phosphate
  modified_base 12: mod_base = OTHER; note = 2'-O-methylguanosine-3'-phosphate
  modified_base 13: mod_base = OTHER; note = 2'-O-methylguanosine-3'-phosphate
  modified_base 14: mod_base = OTHER; note = 2'-deoxy-2'-fluoroadenosine-3'-phosphate
  modified_base 15: mod_base = OTHER; note = 2'-O-methyluridine-3'-phosphate
  modified_base 16: mod_base = OTHER; note = 2'-deoxy-2'-fluorocytidine-3'-phosphate
  modified_base 17: mod_base = OTHER; note = 2'-O-methyladenosine-3'-phosphate
  modified_base 18: mod_base = OTHER; note = 2'-O-methyluridine-3'-phosphate
  modified_base 19: mod_base = OTHER; note = 2'-O-methylguanosine-3'-phosphate
  modified_base 20: mod_base = OTHER; note = 2'-O-methyladenosine-3'-phosphate
  modified_base 21: mod_base = OTHER; note = 2'-O-methyladenosine-3'-phosphorothioate
  modified_base 22: mod_base = OTHER; note = 2'-O-methyladenosine-3'-phosphorothioate
  modified_base 23: mod_base = OTHER; note = 2'-O-methyluridine
agacaggttcaggatcatgaaat

SEQ ID NO: 1153 - RNA, 23 nt, synthetic construct
  source 1..23: mol_type = other RNA
  modified_base 1: mod_base = OTHER; note = 2'-O-methyladenosine-3'-phosphorothioate
  modified_base 2: mod_base = OTHER; note = 2'-deoxy-2'-fluoroadenosine-3'-phosphorothioate
  modified_base 3: mod_base = OTHER; note = 2'-O-methylguanosine-3'-phosphate
  modified_base 4: mod_base = OTHER; note = 2'-O-methyladenosine-3'-phosphate
  modified_base 5: mod_base = OTHER; note = 2'-O-methyladenosine-3'-phosphate
  modified_base 6: mod_base = OTHER; note = 2'-deoxy-2'-fluoroguanosine-3'-phosphate
  modified_base 7: mod_base = OTHER; note = 2'-O-methylguanosine-3'-phosphate
  modified_base 8: mod_base = OTHER; note = 2'-deoxy-2'-fluoroadenosine-3'-phosphate
  modified_base 9: mod_base = OTHER; note = 2'-deoxy-2'-fluorocytidine-3'-phosphate
  modified_base 10: mod_base = OTHER; note = 2'-O-methyladenosine-3'-phosphate
  modified_base 11: mod_base = OTHER; note = 2'-O-methylguanosine-3'-phosphate
  modified_base 12: mod_base = OTHER; note = 2'-O-methylguanosine-3'-phosphate
  modified_base 13: mod_base = OTHER; note = 2'-O-methyluridine-3'-phosphate
  modified_base 14: mod_base = OTHER; note = 2'-deoxy-2'-fluorouridine-3'-phosphate
  modified_base 15: mod_base = OTHER; note = 2'-O-methylcytidine-3'-phosphate
  modified_base 16: mod_base = OTHER; note = 2'-deoxy-2'-fluoroadenosine-3'-phosphate
  modified_base 17: mod_base = OTHER; note = 2'-O-methylguanosine-3'-phosphate
  modified_base 18: mod_base = OTHER; note = 2'-O-methylguanosine-3'-phosphate
  modified_base 19: mod_base = OTHER; note = 2'-O-methyladenosine-3'-phosphate
  modified_base 20: mod_base = OTHER; note = 2'-O-methyluridine-3'-phosphate
  modified_base 21: mod_base = OTHER; note = 2'-O-methylcytidine-3'-phosphorothioate
  modified_base 22: mod_base = OTHER; note = 2'-O-methyladenosine-3'-phosphorothioate
  modified_base 23: mod_base = OTHER; note = 2'-O-methyluridine
aagaaggacaggttcaggatcat

SEQ ID NO: 1154 - RNA, 23 nt, synthetic construct
  source 1..23: mol_type = other RNA
  modified_base 1: mod_base = OTHER; note = 2'-O-methyladenosine-3'-phosphorothioate
  modified_base 2: mod_base = OTHER; note = 2'-deoxy-2'-fluoroguanosine-3'-phosphorothioate
  modified_base 3: mod_base = OTHER; note = 2'-O-methylguanosine-3'-phosphate
  modified_base 4: mod_base = OTHER; note = 2'-O-methyluridine-3'-phosphate
  modified_base 5: mod_base = OTHER; note = 2'-O-methylcytidine-3'-phosphate
  modified_base 6: mod_base = OTHER; note = 2'-deoxy-2'-fluoroadenosine-3'-phosphate
  modified_base 7: mod_base = OTHER; note = 2'-O-methylcytidine-3'-phosphate
  modified_base 8: mod_base = OTHER; note = 2'-deoxy-2'-fluoroadenosine-3'-phosphate
  modified_base 9: mod_base = OTHER; note = 2'-deoxy-2'-fluoroguanosine-3'-phosphate
  modified_base 10: mod_base = OTHER; note = 2'-O-methyladenosine-3'-phosphate
  modified_base 11: mod_base = OTHER; note = 2'-O-methyladenosine-3'-phosphate
  modified_base 12: mod_base = OTHER; note = 2'-O-methylguanosine-3'-phosphate
  modified_base 13: mod_base = OTHER; note = 2'-O-methylguanosine-3'-phosphate
  modified_base 14: mod_base = OTHER; note = 2'-deoxy-2'-fluoroadenosine-3'-phosphate
  modified_base 15: mod_base = OTHER; note = 2'-O-methylcytidine-3'-phosphate
  modified_base 16: mod_base = OTHER; note = 2'-deoxy-2'-fluoroadenosine-3'-phosphate
  modified_base 17: mod_base = OTHER; note = 2'-O-methylguanosine-3'-phosphate
  modified_base 18: mod_base = OTHER; note = 2'-O-methylguanosine-3'-phosphate
  modified_base 19: mod_base = OTHER; note = 2'-O-methyluridine-3'-phosphate
  modified_base 20: mod_base = OTHER; note = 2'-O-methyluridine-3'-phosphate
  modified_base 21: mod_base = OTHER; note = 2'-O-methylcytidine-3'-phosphorothioate
  modified_base 22: mod_base = OTHER; note = 2'-O-methyladenosine-3'-phosphorothioate
  modified_base 23: mod_base = OTHER; note = 2'-O-methylguanosine
aggtcacagaaggacaggttcag

SEQ ID NO: 1155 - RNA, 23 nt, synthetic construct
  source 1..23: mol_type = other RNA
  modified_base 1: mod_base = OTHER; note = 2'-O-methyladenosine-3'-phosphorothioate
  modified_base 2: mod_base = OTHER; note = 2'-deoxy-2'-fluoroguanosine-3'-phosphorothioate
  modified_base 3: mod_base = OTHER; note = 2'-O-methyladenosine-3'-phosphate
  modified_base 4: mod_base = OTHER; note = 2'-O-methyladenosine-3'-phosphate
  modified_base 5: mod_base = OTHER; note = 2'-O-methylguanosine-3'-phosphate
  modified_base 6: mod_base = OTHER; note = 2'-deoxy-2'-fluoroadenosine-3'-phosphate
  modified_base 7: mod_base = OTHER; note = 2'-O-methylguanosine-3'-phosphate
  modified_base 8: mod_base = OTHER; note = 2'-deoxy-2'-fluoroguanosine-3'-phosphate
  modified_base 9: mod_base = OTHER; note = 2'-deoxy-2'-fluorouridine-3'-phosphate
  modified_base 10: mod_base = OTHER; note = 2'-O-methylcytidine-3'-phosphate
  modified_base 11: mod_base = OTHER; note = 2'-O-methyladenosine-3'-phosphate
  modified_base 12: mod_base = OTHER; note = 2'-O-methylcytidine-3'-phosphate
  modified_base 13: mod_base = OTHER; note = 2'-O-methyladenosine-3'-phosphate
  modified_base 14: mod_base = OTHER; note = 2'-deoxy-2'-fluoroguanosine-3'-phosphate
  modified_base 15: mod_base = OTHER; note = 2'-O-methyladenosine-3'-phosphate
  modified_base 16: mod_base = OTHER; note = 2'-deoxy-2'-fluoroadenosine-3'-phosphate
  modified_base 17: mod_base = OTHER; note = 2'-O-methylguanosine-3'-phosphate
  modified_base 18: mod_base = OTHER; note = 2'-O-methylguanosine-3'-phosphate
  modified_base 19: mod_base = OTHER; note = 2'-O-methyladenosine-3'-phosphate
  modified_base 20: mod_base = OTHER; note = 2'-O-methylcytidine-3'-phosphate
  modified_base 21: mod_base = OTHER; note = 2'-O-methyladenosine-3'-phosphorothioate
  modified_base 22: mod_base = OTHER; note = 2'-O-methylguanosine-3'-phosphorothioate
  modified_base 23: mod_base = OTHER; note = 2'-O-methylguanosine
agaagaggtcacagaaggacagg

SEQ ID NO: 1156 - RNA, 23 nt, synthetic construct
  source 1..23: mol_type = other RNA
  modified_base 1: mod_base = OTHER; note = 2'-O-methyladenosine-3'-phosphorothioate
  modified_base 2: mod_base = OTHER; note = 2'-deoxy-2'-fluorocytidine-3'-phosphorothioate
  modified_base 3: mod_base = OTHER; note = 2'-O-methyladenosine-3'-phosphate
  modified_base 4: mod_base = OTHER; note = 2'-O-methyladenosine-3'-phosphate
  modified_base 5: mod_base = OTHER; note = 2'-O-methyladenosine-3'-phosphate
  modified_base 6: mod_base = OTHER; note = 2'-deoxy-2'-fluorouridine-3'-phosphate
  modified_base 7: mod_base = OTHER; note = 2'-O-methylguanosine-3'-phosphate
  modified_base 8: mod_base = OTHER; note = 2'-deoxy-2'-fluoroadenosine-3'-phosphate
  modified_base 9: mod_base = OTHER; note = 2'-deoxy-2'-fluoroadenosine-3'-phosphate
  modified_base 10: mod_base = OTHER; note = 2'-O-methylguanosine-3'-phosphate
  modified_base 11: mod_base = OTHER; note = 2'-O-methyladenosine-3'-phosphate
  modified_base 12: mod_base = OTHER; note = 2'-O-methylguanosine-3'-phosphate
  modified_base 13: mod_base = OTHER; note = 2'-O-methylguanosine-3'-phosphate
  modified_base 14: mod_base = OTHER; note = 2'-deoxy-2'-fluorouridine-3'-phosphate
  modified_base 15: mod_base = OTHER; note = 2'-O-methylcytidine-3'-phosphate
  modified_base 16: mod_base = OTHER; note = 2'-deoxy-2'-fluoroadenosine-3'-phosphate
  modified_base 17: mod_base = OTHER; note = 2'-O-methylcytidine-3'-phosphate
  modified_base 18: mod_base = OTHER; note = 2'-O-methyladenosine-3'-phosphate
  modified_base 19: mod_base = OTHER; note = 2'-O-methylguanosine-3'-phosphate
  modified_base 20: mod_base = OTHER; note = 2'-O-methyladenosine-3'-phosphate
  modified_base 21: mod_base = OTHER; note = 2'-O-methyladenosine-3'-phosphorothioate
  modified_base 22: mod_base = OTHER; note = 2'-O-methylguanosine-3'-phosphorothioate
  modified_base 23: mod_base = OTHER; note = 2'-O-methylguanosine
acaaatgaagaggtcacagaagg

SEQ ID NO: 1157 - RNA, 23 nt, synthetic construct
  source 1..23: mol_type = other RNA
  modified_base 1: mod_base = OTHER; note = 2'-O-methyladenosine-3'-phosphorothioate
  modified_base 2: mod_base = OTHER; note = 2'-deoxy-2'-fluoroadenosine-3'-phosphorothioate
  modified_base 3: mod_base = OTHER; note = 2'-O-methylcytidine-3'-phosphate
  modified_base 4: mod_base = OTHER; note = 2'-O-methyluridine-3'-phosphate
  modified_base 5: mod_base = OTHER; note = 2'-O-methylcytidine-3'-phosphate
  modified_base 6: mod_base = OTHER; note = 2'-deoxy-2'-fluorocytidine-3'-phosphate
  modified_base 7: mod_base = OTHER; note = 2'-O-methyladenosine-3'-phosphate
  modified_base 8: mod_base = OTHER; note = 2'-deoxy-2'-fluorocytidine-3'-phosphate
  modified_base 9: mod_base = OTHER; note = 2'-deoxy-2'-fluoroadenosine-3'-phosphate
  modified_base 10: mod_base = OTHER; note = 2'-O-methyladenosine-3'-phosphate
  modified_base 11: mod_base = OTHER; note = 2'-O-methyladenosine-3'-phosphate
  modified_base 12: mod_base = OTHER; note = 2'-O-methyluridine-3'-phosphate
  modified_base 13: mod_base = OTHER; note = 2'-O-methylguanosine-3'-phosphate
  modified_base 14: mod_base = OTHER; note = 2'-deoxy-2'-fluoroadenosine-3'-phosphate
  modified_base 15: mod_base = OTHER; note = 2'-O-methyladenosine-3'-phosphate
  modified_base 16: mod_base = OTHER; note = 2'-deoxy-2'-fluoroguanosine-3'-phosphate
  modified_base 17: mod_base = OTHER; note = 2'-O-methyladenosine-3'-phosphate
  modified_base 18: mod_base = OTHER; note = 2'-O-methylguanosine-3'-phosphate
  modified_base 19: mod_base = OTHER; note = 2'-O-methylguanosine-3'-phosphate
  modified_base 20: mod_base = OTHER; note = 2'-O-methyluridine-3'-phosphate
  modified_base 21: mod_base = OTHER; note = 2'-O-methylcytidine-3'-phosphorothioate
  modified_base 22: mod_base = OTHER; note = 2'-O-methyladenosine-3'-phosphorothioate
  modified_base 23: mod_base = OTHER; note = 2'-O-methylcytidine
aactccacaaatgaagaggtcac

SEQ ID NO: 1158 - RNA, 23 nt, synthetic construct
  source 1..23: mol_type = other RNA
  modified_base 1: mod_base = OTHER; note = 2'-O-methyladenosine-3'-phosphorothioate
  modified_base 2: mod_base = OTHER; note = 2'-deoxy-2'-fluorocytidine-3'-phosphorothioate
  modified_base 3: mod_base = OTHER; note = 2'-O-methyluridine-3'-phosphate
  modified_base 4: mod_base = OTHER; note = 2'-O-methylguanosine-3'-phosphate
  modified_base 5: mod_base = OTHER; note = 2'-O-methyluridine-3'-phosphate
  modified_base 6: mod_base = OTHER; note = 2'-deoxy-2'-fluorocytidine-3'-phosphate
  modified_base 7: mod_base = OTHER; note = 2'-O-methyladenosine-3'-phosphate
  modified_base 8: mod_base = OTHER; note = 2'-deoxy-2'-fluorocytidine-3'-phosphate
  modified_base 9: mod_base = OTHER; note = 2'-deoxy-2'-fluorouridine-3'-phosphate
  modified_base 10: mod_base = OTHER; note = 2'-O-methylcytidine-3'-phosphate
  modified_base 11: mod_base = OTHER; note = 2'-O-methylcytidine-3'-phosphate
  modified_base 12: mod_base = OTHER; note = 2'-O-methyladenosine-3'-phosphate
  modified_base 13: mod_base = OTHER; note = 2'-O-methylcytidine-3'-phosphate
  modified_base 14: mod_base = OTHER; note = 2'-deoxy-2'-fluoroadenosine-3'-phosphate
  modified_base 15: mod_base = OTHER; note = 2'-O-methyladenosine-3'-phosphate
  modified_base 16: mod_base = OTHER; note = 2'-deoxy-2'-fluoroadenosine-3'-phosphate
  modified_base 17: mod_base = OTHER; note = 2'-O-methyluridine-3'-phosphate
  modified_base 18: mod_base = OTHER; note = 2'-O-methylguanosine-3'-phosphate
  modified_base 19: mod_base = OTHER; note = 2'-O-methyladenosine-3'-phosphate
  modified_base 20: mod_base = OTHER; note = 2'-O-methyladenosine-3'-phosphate
  modified_base 21: mod_base = OTHER; note = 2'-O-methylguanosine-3'-phosphorothioate
  modified_base 22: mod_base = OTHER; note = 2'-O-methyladenosine-3'-phosphorothioate
  modified_base 23: mod_base = OTHER; note = 2'-O-methylguanosine
actgtcactccacaaatgaagag

SEQ ID NO: 1159 - RNA, 23 nt, synthetic construct
  source 1..23: mol_type = other RNA
  modified_base 1: mod_base = OTHER; note = 2'-O-methyladenosine-3'-phosphorothioate
  modified_base 2: mod_base = OTHER; note = 2'-deoxy-2'-fluoroadenosine-3'-phosphorothioate
  modified_base 3: mod_base = OTHER; note = 2'-O-methyluridine-3'-phosphate
  modified_base 4: mod_base = OTHER; note = 2'-O-methyladenosine-3'-phosphate
  modified_base 5: mod_base = OTHER; note = 2'-O-methyladenosine-3'-phosphate
  modified_base 6: mod_base = OTHER; note = 2'-deoxy-2'-fluorocytidine-3'-phosphate
  modified_base 7: mod_base = OTHER; note = 2'-O-methyladenosine-3'-phosphate
  modified_base 8: mod_base = OTHER; note = 2'-deoxy-2'-fluorocytidine-3'-phosphate
  modified_base 9: mod_base = OTHER; note = 2'-deoxy-2'-fluoroadenosine-3'-phosphate
  modified_base 10: mod_base = OTHER; note = 2'-O-methyladenosine-3'-phosphate
  modified_base 11: mod_base = OTHER; note = 2'-O-methyladenosine-3'-phosphate
  modified_base 12: mod_base = OTHER; note = 2'-O-methylguanosine-3'-phosphate
  modified_base 13: mod_base = OTHER; note = 2'-O-methylguanosine-3'-phosphate
  modified_base 14: mod_base = OTHER; note = 2'-deoxy-2'-fluorouridine-3'-phosphate
  modified_base 15: mod_base = OTHER; note = 2'-O-methylguanosine-3'-phosphate
  modified_base 16: mod_base = OTHER; note = 2'-deoxy-2'-fluoroadenosine-3'-phosphate
  modified_base 17: mod_base = OTHER; note = 2'-O-methyladenosine-3'-phosphate
  modified_base 18: mod_base = OTHER; note = 2'-O-methylcytidine-3'-phosphate
  modified_base 19: mod_base = OTHER; note = 2'-O-methyladenosine-3'-phosphate
  modified_base 20: mod_base = OTHER; note = 2'-O-methyluridine-3'-phosphate
  modified_base 21: mod_base = OTHER; note = 2'-O-methylguanosine-3'-phosphorothioate
  modified_base 22: mod_base = OTHER; note = 2'-O-methylguanosine-3'-phosphorothioate
  modified_base 23: mod_base = OTHER; note = 2'-O-methylguanosine
aataacacaaaggtgaacatggg

SEQ ID NO: 1160 - RNA, 23 nt, synthetic construct
  source 1..23: mol_type = other RNA
  modified_base 1: mod_base = OTHER; note = 2'-O-methyladenosine-3'-phosphorothioate
  modified_base 2: mod_base = OTHER; note = 2'-deoxy-2'-fluoroguanosine-3'-phosphorothioate
  modified_base 3: mod_base = OTHER; note = 2'-O-methyladenosine-3'-phosphate
  modified_base 4: mod_base = OTHER; note = 2'-O-methyladenosine-3'-phosphate
  modified_base 5: mod_base = OTHER; note = 2'-O-methylguanosine-3'-phosphate
  modified_base 6: mod_base = OTHER; note = 2'-deoxy-2'-fluoroadenosine-3'-phosphate
  modified_base 7: mod_base = OTHER; note = 2'-O-methyladenosine-3'-phosphate
  modified_base 8: mod_base = OTHER; note = 2'-deoxy-2'-fluorouridine-3'-phosphate
  modified_base 9: mod_base = OTHER; note = 2'-deoxy-2'-fluoroadenosine-3'-phosphate
  modified_base 10: mod_base = OTHER; note = 2'-O-methyladenosine-3'-phosphate
  modified_base 11: mod_base = OTHER; note = 2'-O-methylcytidine-3'-phosphate
  modified_base 12: mod_base = OTHER; note = 2'-O-methyladenosine-3'-phosphate
  modified_base 13: mod_base = OTHER; note = 2'-O-methylcytidine-3'-phosphate
  modified_base 14: mod_base = OTHER; note = 2'-deoxy-2'-fluoroadenosine-3'-phosphate
  modified_base 15: mod_base = OTHER; note = 2'-O-methyladenosine-3'-phosphate
  modified_base 16: mod_base = OTHER; note = 2'-deoxy-2'-fluoroadenosine-3'-phosphate
  modified_base 17: mod_base = OTHER; note = 2'-O-methylguanosine-3'-phosphate
  modified_base 18: mod_base = OTHER; note = 2'-O-methylguanosine-3'-phosphate
  modified_base 19: mod_base = OTHER; note = 2'-O-methyluridine-3'-phosphate
  modified_base 20: mod_base = OTHER; note = 2'-O-methylguanosine-3'-phosphate
  modified_base 21: mod_base = OTHER; note = 2'-O-methyladenosine-3'-phosphorothioate
  modified_base 22: mod_base = OTHER; note = 2'-O-methyladenosine-3'-phosphorothioate
  modified_base 23: mod_base = OTHER; note = 2'-O-methylcytidine
agaagaataacacaaaggtgaac

SEQ ID NO: 1161 - RNA, 23 nt, synthetic construct
  source 1..23: mol_type = other RNA
  modified_base 1: mod_base = OTHER; note = 2'-O-methyladenosine-3'-phosphorothioate
  modified_base 2: mod_base = OTHER; note = 2'-deoxy-2'-fluoroguanosine-3'-phosphorothioate
  modified_base 3: mod_base = OTHER; note = 2'-O-methyladenosine-3'-phosphate
  modified_base 4: mod_base = OTHER; note = 2'-O-methylguanosine-3'-phosphate
  modified_base 5: mod_base = OTHER; note = 2'-O-methylcytidine-3'-phosphate
  modified_base 6: mod_base = OTHER; note = 2'-deoxy-2'-fluorouridine-3'-phosphate
  modified_base 7: mod_base = OTHER; note = 2'-O-methylguanosine-3'-phosphate
  modified_base 8: mod_base = OTHER; note = 2'-deoxy-2'-fluoroadenosine-3'-phosphate
  modified_base 9: mod_base = OTHER; note = 2'-deoxy-2'-fluoroadenosine-3'-phosphate
  modified_base 10: mod_base = OTHER; note = 2'-O-methylguanosine-3'-phosphate
  modified_base 11: mod_base = OTHER; note = 2'-O-methyladenosine-3'-phosphate
  modified_base 12: mod_base = OTHER; note = 2'-O-methyladenosine-3'-phosphate
  modified_base 13: mod_base = OTHER; note = 2'-O-methyluridine-3'-phosphate
  modified_base 14: mod_base = OTHER; note = 2'-deoxy-2'-fluoroadenosine-3'-phosphate
  modified_base 15: mod_base = OTHER; note = 2'-O-methyladenosine-3'-phosphate
  modified_base 16: mod_base = OTHER; note = 2'-deoxy-2'-fluorocytidine-3'-phosphate
  modified_base 17: mod_base = OTHER; note = 2'-O-methyladenosine-3'-phosphate
  modified_base 18: mod_base = OTHER; note = 2'-O-methylcytidine-3'-phosphate
  modified_base 19: mod_base = OTHER; note = 2'-O-methyladenosine-3'-phosphate
  modified_base 20: mod_base = OTHER; note = 2'-O-methyladenosine-3'-phosphate
  modified_base 21: mod_base = OTHER; note = 2'-O-methyladenosine-3'-phosphorothioate
  modified_base 22: mod_base = OTHER; note = 2'-O-methylguanosine-3'-phosphorothioate
  modified_base 23: mod_base = OTHER; note = 2'-O-methylguanosine
agagctgaagaataacacaaagg

SEQ ID NO: 1162 - RNA, 23 nt, synthetic construct
  source 1..23: mol_type = other RNA
  modified_base 1: mod_base = OTHER; note = 2'-O-methyladenosine-3'-phosphorothioate
  modified_base 2: mod_base = OTHER; note = 2'-deoxy-2'-fluorouridine-3'-phosphorothioate
  modified_base 3: mod_base = OTHER; note = 2'-O-methylguanosine-3'-phosphate
  modified_base 4: mod_base = OTHER; note = 2'-O-methylguanosine-3'-phosphate
  modified_base 5: mod_base = OTHER; note = 2'-O-methylcytidine-3'-phosphate
  modified_base 6: mod_base = OTHER; note = 2'-deoxy-2'-fluorouridine-3'-phosphate
  modified_base 7: mod_base = OTHER; note = 2'-O-methylguanosine-3'-phosphate
  modified_base 8: mod_base = OTHER; note = 2'-deoxy-2'-fluoroadenosine-3'-phosphate
  modified_base 9: mod_base = OTHER; note = 2'-deoxy-2'-fluoroguanosine-3'-phosphate
  modified_base 10: mod_base = OTHER; note = 2'-O-methylcytidine-3'-phosphate
  modified_base 11: mod_base = OTHER; note = 2'-O-methyluridine-3'-phosphate
  modified_base 12: mod_base = OTHER; note = 2'-O-methylguanosine-3'-phosphate
  modified_base 13: mod_base = OTHER; note = 2'-O-methyladenosine-3'-phosphate
  modified_base 14: mod_base = OTHER; note = 2'-deoxy-2'-fluoroadenosine-3'-phosphate
  modified_base 15: mod_base = OTHER; note = 2'-O-methylguanosine-3'-phosphate
  modified_base 16: mod_base = OTHER; note = 2'-deoxy-2'-fluoroadenosine-3'-phosphate
  modified_base 17: mod_base = OTHER; note = 2'-O-methyladenosine-3'-phosphate
  modified_base 18: mod_base = OTHER; note = 2'-O-methyluridine-3'-phosphate
  modified_base 19: mod_base = OTHER; note = 2'-O-methyladenosine-3'-phosphate
  modified_base 20: mod_base = OTHER; note = 2'-O-methyladenosine-3'-phosphate
  modified_base 21: mod_base = OTHER; note = 2'-O-methylcytidine-3'-phosphorothioate
  modified_base 22: mod_base = OTHER; note = 2'-O-methyladenosine-3'-phosphorothioate
  modified_base 23: mod_base = OTHER; note = 2'-O-methylcytidine
atggctgagctgaagaataacac

SEQ ID NO: 1163 - RNA, 23 nt, synthetic construct
  source 1..23: mol_type = other RNA
  modified_base 1: mod_base = OTHER; note = 2'-O-methyladenosine-3'-phosphorothioate
  modified_base 2: mod_base = OTHER; note = 2'-deoxy-2'-fluoroguanosine-3'-phosphorothioate
  modified_base 3: mod_base = OTHER; note = 2'-O-methylguanosine-3'-phosphate
  modified_base 4: mod_base = OTHER; note = 2'-O-methyladenosine-3'-phosphate
  modified_base 5: mod_base = OTHER; note = 2'-O-methyluridine-3'-phosphate
  modified_base 6: mod_base = OTHER; note = 2'-deoxy-2'-fluoroadenosine-3'-phosphate
  modified_base 7: mod_base = OTHER; note = 2'-O-methylcytidine-3'-phosphate
  modified_base 8: mod_base = OTHER; note = 2'-deoxy-2'-fluorouridine-3'-phosphate
  modified_base 9: mod_base = OTHER; note = 2'-deoxy-2'-fluoroadenosine-3'-phosphate
  modified_base 10: mod_base = OTHER; note = 2'-O-methylcytidine-3'-phosphate
  modified_base 11: mod_base = OTHER; note = 2'-O-methyluridine-3'-phosphate
  modified_base 12: mod_base = OTHER; note = 2'-O-methylguanosine-3'-phosphate
  modified_base 13: mod_base = OTHER; note = 2'-O-methylguanosine-3'-phosphate
  modified_base 14: mod_base = OTHER; note = 2'-deoxy-2'-fluorocytidine-3'-phosphate
  modified_base 15: mod_base = OTHER; note = 2'-O-methyluridine-3'-phosphate
  modified_base 16: mod_base = OTHER; note = 2'-deoxy-2'-fluoroguanosine-3'-phosphate
  modified_base 17: mod_base = OTHER; note = 2'-O-methyladenosine-3'-phosphate
  modified_base 18: mod_base = OTHER; note = 2'-O-methylguanosine-3'-phosphate
  modified_base 19: mod_base = OTHER; note = 2'-O-methylcytidine-3'-phosphate
  modified_base 20: mod_base = OTHER; note = 2'-O-methyluridine-3'-phosphate
  modified_base 21: mod_base = OTHER; note = 2'-O-methylguanosine-3'-phosphorothioate
  modified_base 22: mod_base = OTHER; note = 2'-O-methyladenosine-3'-phosphorothioate
  modified_base 23: mod_base = OTHER; note = 2'-O-methyladenosine
aggatactactggctgagctgaa

SEQ ID NO: 1164 - RNA, 23 nt, synthetic construct
  source 1..23: mol_type = other RNA
  modified_base 1: mod_base = OTHER; note = 2'-O-methyladenosine-3'-phosphorothioate
  modified_base 2: mod_base = OTHER; note = 2'-deoxy-2'-fluoroadenosine-3'-phosphorothioate
  modified_base 3: mod_base = OTHER; note = 2'-O-methyluridine-3'-phosphate
  modified_base 4: mod_base = OTHER; note = 2'-O-methylcytidine-3'-phosphate
  modified_base 5: mod_base = OTHER; note = 2'-O-methylcytidine-3'-phosphate
  modified_base 6: mod_base = OTHER; note = 2'-deoxy-2'-fluoroguanosine-3'-phosphate
  modified_base 7: mod_base = OTHER; note = 2'-O-methylguanosine-3'-phosphate
  modified_base 8: mod_base = OTHER; note = 2'-deoxy-2'-fluoroguanosine-3'-phosphate
  modified_base 9: mod_base = OTHER; note = 2'-deoxy-2'-fluoroadenosine-3'-phosphate
  modified_base 10: mod_base = OTHER; note = 2'-O-methyluridine-3'-phosphate
  modified_base 11: mod_base = OTHER; note = 2'-O-methyladenosine-3'-phosphate
  modified_base 12: mod_base = OTHER; note = 2'-O-methylcytidine-3'-phosphate
  modified_base 13: mod_base = OTHER; note = 2'-O-methyluridine-3'-phosphate
  modified_base 14: mod_base = OTHER; note = 2'-deoxy-2'-fluoroadenosine-3'-phosphate
  modified_base 15: mod_base = OTHER; note = 2'-O-methylcytidine-3'-phosphate
  modified_base 16: mod_base = OTHER; note = 2'-deoxy-2'-fluorouridine-3'-phosphate
  modified_base 17: mod_base = OTHER; note = 2'-O-methylguanosine-3'-phosphate
  modified_base 18: mod_base = OTHER; note = 2'-O-methylguanosine-3'-phosphate
  modified_base 19: mod_base = OTHER; note = 2'-O-methylcytidine-3'-phosphate
  modified_base 20: mod_base = OTHER; note = 2'-O-methyluridine-3'-phosphate
  modified_base 21: mod_base = OTHER; note = 2'-O-methylguanosine-3'-phosphorothioate
  modified_base 22: mod_base = OTHER; note = 2'-O-methyladenosine-3'-phosphorothioate
  modified_base 23: mod_base = OTHER; note = 2'-O-methylguanosine
aatccgggatactactggctgag

SEQ ID NO: 1165 - RNA, 23 nt, synthetic construct
  source 1..23: mol_type = other RNA
  modified_base 1: mod_base = OTHER; note = 2'-O-methyladenosine-3'-phosphorothioate
  modified_base 2: mod_base = OTHER; note = 2'-deoxy-2'-fluoroadenosine-3'-phosphorothioate
  modified_base 3: mod_base = OTHER; note = 2'-O-methylguanosine-3'-phosphate
  modified_base 4: mod_base = OTHER; note = 2'-O-methyladenosine-3'-phosphate
  modified_base 5: mod_base = OTHER; note = 2'-O-methyladenosine-3'-phosphate
  modified_base 6: mod_base = OTHER; note = 2'-deoxy-2'-fluoroadenosine-3'-phosphate
  modified_base 7: mod_base = OTHER; note = 2'-O-methylguanosine-3'-phosphate
  modified_base 8: mod_base = OTHER; note = 2'-deoxy-2'-fluorocytidine-3'-phosphate
  modified_base 9: mod_base = OTHER; note = 2'-deoxy-2'-fluoroadenosine-3'-phosphate
  modified_base 10: mod_base = OTHER; note = 2'-O-methyluridine-3'-phosphate
  modified_base 11: mod_base = OTHER; note = 2'-O-methylcytidine-3'-phosphate
  modified_base 12: mod_base = OTHER; note = 2'-O-methylcytidine-3'-phosphate
  modified_base 13: mod_base = OTHER; note = 2'-O-methylguanosine-3'-phosphate
  modified_base 14: mod_base = OTHER; note = 2'-deoxy-2'-fluoroguanosine-3'-phosphate
  modified_base 15: mod_base = OTHER; note = 2'-O-methylguanosine-3'-phosphate
  modified_base 16: mod_base = OTHER; note = 2'-deoxy-2'-fluoroadenosine-3'-phosphate
  modified_base 17: mod_base = OTHER; note = 2'-O-methyluridine-3'-phosphate
  modified_base 18: mod_base = OTHER; note = 2'-O-methyladenosine-3'-phosphate
  modified_base 19: mod_base = OTHER; note = 2'-O-methylcytidine-3'-phosphate
  modified_base 20: mod_base = OTHER; note = 2'-O-methyluridine-3'-phosphate
  modified_base 21: mod_base = OTHER; note = 2'-O-methyladenosine-3'-phosphorothioate
  modified_base 22: mod_base = OTHER; note = 2'-O-methylcytidine-3'-phosphorothioate
  modified_base 23: mod_base = OTHER; note = 2'-O-methyluridine
aagaaagcatccgggatactact

SEQ ID NO: 1166 - RNA, 23 nt, synthetic construct
  source 1..23: mol_type = other RNA
  modified_base 1: mod_base = OTHER; note = 2'-O-methyladenosine-3'-phosphorothioate
  modified_base 2: mod_base = OTHER; note = 2'-deoxy-2'-fluoroguanosine-3'-phosphorothioate
  modified_base 3: mod_base = OTHER; note = 2'-O-methyladenosine-3'-phosphate
  modified_base 4: mod_base = OTHER; note = 2'-O-methyladenosine-3'-phosphate
  modified_base 5: mod_base = OTHER; note = 2'-O-methylguanosine-3'-phosphate
  modified_base 6: mod_base = OTHER; note = 2'-deoxy-2'-fluorocytidine-3'-phosphate
  modified_base 7: mod_base = OTHER; note = 2'-O-methyladenosine-3'-phosphate
  modified_base 8: mod_base = OTHER; note = 2'-deoxy-2'-fluoroguanosine-3'-phosphate
  modified_base 9: mod_base = OTHER; note = 2'-deoxy-2'-fluoroadenosine-3'-phosphate
  modified_base 10: mod_base = OTHER; note = 2'-O-methyladenosine-3'-phosphate
  modified_base 11: mod_base = OTHER; note = 2'-O-methyladenosine-3'-phosphate
  modified_base 12: mod_base = OTHER; note = 2'-O-methylguanosine-3'-phosphate
  modified_base 13: mod_base = OTHER; note = 2'-O-methylcytidine-3'-phosphate
  modified_base 14: mod_base = OTHER; note = 2'-deoxy-2'-fluoroadenosine-3'-phosphate
  modified_base 15: mod_base = OTHER; note = 2'-O-methyluridine-3'-phosphate
  modified_base 16: mod_base = OTHER; note = 2'-deoxy-2'-fluorocytidine-3'-phosphate
  modified_base 17: mod_base = OTHER; note = 2'-O-methylcytidine-3'-phosphate
  modified_base 18: mod_base = OTHER; note = 2'-O-methylguanosine-3'-phosphate
  modified_base 19: mod_base = OTHER; note = 2'-O-methylguanosine-3'-phosphate
  modified_base 20: mod_base = OTHER; note = 2'-O-methylguanosine-3'-phosphate
  modified_base 21: mod_base = OTHER; note = 2'-O-methyladenosine-3'-phosphorothioate
  modified_base 22: mod_base = OTHER; note = 2'-O-methyluridine-3'-phosphorothioate
  modified_base 23: mod_base = OTHER; note = 2'-O-methyladenosine
agaagcagaaagcatccgggata

SEQ ID NO: 1167 - RNA, 23 nt, synthetic construct
  source 1..23: mol_type = other RNA
  modified_base 1: mod_base = OTHER; note = 2'-O-methyladenosine-3'-phosphorothioate
  modified_base 2: mod_base = OTHER; note = 2'-deoxy-2'-fluoroadenosine-3'-phosphorothioate
  modified_base 3: mod_base = OTHER; note = 2'-O-methyladenosine-3'-phosphate
  modified_base 4: mod_base = OTHER; note = 2'-O-methyladenosine-3'-phosphate
  modified_base 5: mod_base = OTHER; note = 2'-O-methylguanosine-3'-phosphate
  modified_base 6: mod_base = OTHER; note = 2'-deoxy-2'-fluorouridine-3'-phosphate
  modified_base 7: mod_base = OTHER; note = 2'-O-methylguanosine-3'-phosphate
  modified_base 8: mod_base = OTHER; note = 2'-deoxy-2'-fluoroadenosine-3'-phosphate
  modified_base 9: mod_base = OTHER; note = 2'-deoxy-2'-fluoroadenosine-3'-phosphate
  modified_base 10: mod_base = OTHER; note = 2'-O-methylguanosine-3'-phosphate
  modified_base 11: mod_base = OTHER; note = 2'-O-methylcytidine-3'-phosphate
  modified_base 12: mod_base = OTHER; note = 2'-O-methyladenosine-3'-phosphate
  modified_base 13: mod_base = OTHER; note = 2'-O-methylguanosine-3'-phosphate
  modified_base 14: mod_base = OTHER; note = 2'-deoxy-2'-fluoroadenosine-3'-phosphate
  modified_base 15: mod_base = OTHER; note = 2'-O-methyladenosine-3'-phosphate
  modified_base 16: mod_base = OTHER; note = 2'-deoxy-2'-fluoroadenosine-3'-phosphate
  modified_base 17: mod_base = OTHER; note = 2'-O-methylguanosine-3'-phosphate
  modified_base 18: mod_base = OTHER; note = 2'-O-methylcytidine-3'-phosphate
  modified_base 19: mod_base = OTHER; note = 2'-O-methyladenosine-3'-phosphate
  modified_base 20: mod_base = OTHER; note = 2'-O-methyluridine-3'-phosphate
  modified_base 21: mod_base = OTHER; note = 2'-O-methylcytidine-3'-phosphorothioate
  modified_base 22: mod_base = OTHER; note = 2'-O-methylcytidine-3'-phosphorothioate
  modified_base 23: mod_base = OTHER; note = 2'-O-methylguanosine
aaaagtgaagcagaaagcatccg

SEQ ID NO: 1168 - RNA, 23 nt, synthetic construct
  source 1..23: mol_type = other RNA
  modified_base 1: mod_base = OTHER; note = 2'-O-methyladenosine-3'-phosphorothioate
  modified_base 2: mod_base = OTHER; note = 2'-deoxy-2'-fluoroguanosine-3'-phosphorothioate
  modified_base 3: mod_base = OTHER; note = 2'-O-methyladenosine-3'-phosphate
  modified_base 4: mod_base = OTHER; note = 2'-O-methyluridine-3'-phosphate
  modified_base 5: mod_base = OTHER; note = 2'-O-methylguanosine-3'-phosphate
  modified_base 6: mod_base = OTHER; note = 2'-deoxy-2'-fluoroguanosine-3'-phosphate
  modified_base 7: mod_base = OTHER; note = 2'-O-methyladenosine-3'-phosphate
  modified_base 8: mod_base = OTHER; note = 2'-deoxy-2'-fluoroadenosine-3'-phosphate
  modified_base 9: mod_base = OTHER; note = 2'-deoxy-2'-fluoroadenosine-3'-phosphate
  modified_base 10: mod_base = OTHER; note = 2'-O-methylguanosine-3'-phosphate
  modified_base 11: mod_base = OTHER; note = 2'-O-methyluridine-3'-phosphate
  modified_base 12: mod_base = OTHER; note = 2'-O-methylguanosine-3'-phosphate
  modified_base 13: mod_base = OTHER; note = 2'-O-methyladenosine-3'-phosphate
  modified_base 14: mod_base = OTHER; note = 2'-deoxy-2'-fluoroadenosine-3'-phosphate
  modified_base 15: mod_base = OTHER; note = 2'-O-methylguanosine-3'-phosphate
  modified_base 16: mod_base = OTHER; note = 2'-deoxy-2'-fluorocytidine-3'-phosphate
  modified_base 17: mod_base = OTHER; note = 2'-O-methyladenosine-3'-phosphate
  modified_base 18: mod_base = OTHER; note = 2'-O-methylguanosine-3'-phosphate
  modified_base 19: mod_base = OTHER; note = 2'-O-methyladenosine-3'-phosphate
  modified_base 20: mod_base = OTHER; note = 2'-O-methyladenosine-3'-phosphate
  modified_base 21: mod_base = OTHER; note = 2'-O-methyladenosine-3'-phosphorothioate
  modified_base 22: mod_base = OTHER; note = 2'-O-methylguanosine-3'-phosphorothioate
  modified_base 23: mod_base = OTHER; note = 2'-O-methylcytidine
agatggaaagtgaagcagaaagc

SEQ ID NO: 1169 - RNA, 23 nt, synthetic construct
  source 1..23: mol_type = other RNA
  modified_base 1: mod_base = OTHER; note = 2'-O-methyladenosine-3'-phosphorothioate
  modified_base 2: mod_base = OTHER; note = 2'-deoxy-2'-fluoroadenosine-3'-phosphorothioate
  modified_base 3: mod_base = OTHER; note = 2'-O-methyladenosine-3'-phosphate
  modified_base 4: mod_base = OTHER; note = 2'-O-methylcytidine-3'-phosphate
  modified_base 5: mod_base = OTHER; note = 2'-O-methyluridine-3'-phosphate
  modified_base 6: mod_base = OTHER; note = 2'-deoxy-2'-fluoroguanosine-3'-phosphate
  modified_base 7: mod_base = OTHER; note = 2'-O-methylguanosine-3'-phosphate
  modified_base 8: mod_base = OTHER; note = 2'-deoxy-2'-fluorouridine-3'-phosphate
  modified_base 9: mod_base = OTHER; note = 2'-deoxy-2'-fluoroguanosine-3'-phosphate
  modified_base 10: mod_base = OTHER; note = 2'-O-methyladenosine-3'-phosphate
  modified_base 11: mod_base = OTHER; note = 2'-O-methylguanosine-3'-phosphate
  modified_base 12: mod_base = OTHER; note = 2'-O-methyladenosine-3'-phosphate
  modified_base 13: mod_base = OTHER; note = 2'-O-methyluridine-3'-phosphate
  modified_base 14: mod_base = OTHER; note = 2'-deoxy-2'-fluoroguanosine-3'-phosphate
  modified_base 15: mod_base = OTHER; note = 2'-O-methylguanosine-3'-phosphate
  modified_base 16: mod_base = OTHER; note = 2'-deoxy-2'-fluoroadenosine-3'-phosphate
  modified_base 17: mod_base = OTHER; note = 2'-O-methyladenosine-3'-phosphate
  modified_base 18: mod_base = OTHER; note = 2'-O-methyladenosine-3'-phosphate
  modified_base 19: mod_base = OTHER; note = 2'-O-methylguanosine-3'-phosphate
  modified_base 20: mod_base = OTHER; note = 2'-O-methyluridine-3'-phosphate
  modified_base 21: mod_base = OTHER; note = 2'-O-methylguanosine-3'-phosphorothioate
  modified_base 22: mod_base = OTHER; note = 2'-O-methyladenosine-3'-phosphorothioate
  modified_base 23: mod_base = OTHER; note = 2'-O-methyladenosine
aaactggtgagatggaaagtgaa

SEQ ID NO: 1170 - RNA, 23 nt, synthetic construct
  source 1..23: mol_type = other RNA
  modified_base 1: mod_base = OTHER; note = 2'-O-methyladenosine-3'-phosphorothioate
  modified_base 2: mod_base = OTHER; note = 2'-deoxy-2'-fluoroadenosine-3'-phosphorothioate
  modified_base 3: mod_base = OTHER; note = 2'-O-methylguanosine-3'-phosphate
  modified_base 4: mod_base = OTHER; note = 2'-O-methylcytidine-3'-phosphate
  modified_base 5: mod_base = OTHER; note = 2'-O-methylcytidine-3'-phosphate
  modified_base 6: mod_base = OTHER; note = 2'-deoxy-2'-fluorouridine-3'-phosphate
  modified_base 7: mod_base = OTHER; note = 2'-O-methylguanosine-3'-phosphate
  modified_base 8: mod_base = OTHER; note = 2'-deoxy-2'-fluoroadenosine-3'-phosphate
  modified_base 9: mod_base = OTHER; note = 2'-deoxy-2'-fluoroadenosine-3'-phosphate
  modified_base 10: mod_base = OTHER; note = 2'-O-methylcytidine-3'-phosphate
  modified_base 11: mod_base = OTHER; note = 2'-O-methyluridine-3'-phosphate
  modified_base 12: mod_base = OTHER; note = 2'-O-methylguanosine-3'-phosphate
  modified_base 13: mod_base = OTHER; note = 2'-O-methylguanosine-3'-phosphate
  modified_base 14: mod_base = OTHER; note = 2'-deoxy-2'-fluorouridine-3'-phosphate
  modified_base 15: mod_base = OTHER; note = 2'-O-methylguanosine-3'-phosphate
  modified_base 16: mod_base = OTHER; note = 2'-deoxy-2'-fluoroadenosine-3'-phosphate
  modified_base 17: mod_base = OTHER; note = 2'-O-methylguanosine-3'-phosphate
  modified_base 18: mod_base = OTHER; note = 2'-O-methyladenosine-3'-phosphate
  modified_base 19: mod_base = OTHER; note = 2'-O-methyluridine-3'-phosphate
  modified_base 20: mod_base = OTHER; note = 2'-O-methylguanosine-3'-phosphate
  modified_base 21: mod_base = OTHER; note = 2'-O-methylguanosine-3'-phosphorothioate
  modified_base 22: mod_base = OTHER; note = 2'-O-methyladenosine-3'-phosphorothioate
  modified_base 23: mod_base = OTHER; note = 2'-O-methyladenosine
aagcctgaactggtgagatggaa

SEQ ID NO: 1171 - RNA, 23 nt, synthetic construct
  source 1..23: mol_type = other RNA
  modified_base 1: mod_base = OTHER; note = 2'-O-methyladenosine-3'-phosphorothioate
  modified_base 2: mod_base = OTHER; note = 2'-deoxy-2'-fluoroguanosine-3'-phosphorothioate
  modified_base 3: mod_base = OTHER; note = 2'-O-methyladenosine-3'-phosphate
  modified_base 4: mod_base = OTHER; note = 2'-O-methyluridine-3'-phosphate
  modified_base 5: mod_base = OTHER; note = 2'-O-methylguanosine-3'-phosphate
  modified_base 6: mod_base = OTHER; note = 2'-deoxy-2'-fluoroadenosine-3'-phosphate
  modified_base 7: mod_base = OTHER; note = 2'-O-methyladenosine-3'-phosphate
  modified_base 8: mod_base = OTHER; note = 2'-deoxy-2'-fluoroguanosine-3'-phosphate
  modified_base 9: mod_base = OTHER; note = 2'-deoxy-2'-fluorocytidine-3'-phosphate
  modified_base 10: mod_base = OTHER; note = 2'-O-methylcytidine-3'-phosphate
  modified_base 11: mod_base = OTHER; note = 2'-O-methyluridine-3'-phosphate
  modified_base 12: mod_base = OTHER; note = 2'-O-methylguanosine-3'-phosphate
  modified_base 13: mod_base = OTHER; note = 2'-O-methyladenosine-3'-phosphate
  modified_base 14: mod_base = OTHER; note = 2'-deoxy-2'-fluoroadenosine-3'-phosphate
  modified_base 15: mod_base = OTHER; note = 2'-O-methylcytidine-3'-phosphate
  modified_base 16: mod_base = OTHER; note = 2'-deoxy-2'-fluorouridine-3'-phosphate
  modified_base 17: mod_base = OTHER; note = 2'-O-methylguanosine-3'-phosphate
  modified_base 18: mod_base = OTHER; note = 2'-O-methylguanosine-3'-phosphate
  modified_base 19: mod_base = OTHER; note = 2'-O-methyluridine-3'-phosphate
  modified_base 20: mod_base = OTHER; note = 2'-O-methylguanosine-3'-phosphate
  modified_base 21: mod_base = OTHER; note = 2'-O-methyladenosine-3'-phosphorothioate
  modified_base 22: mod_base = OTHER; note = 2'-O-methylguanosine-3'-phosphorothioate
  modified_base 23: mod_base = OTHER; note = 2'-O-methyladenosine
agatgaagcctgaactggtgaga

SEQ ID NO: 1172 - RNA, 23 nt, synthetic construct
  source 1..23: mol_type = other RNA
  modified_base 1: mod_base = OTHER; note = 2'-O-methyladenosine-3'-phosphorothioate
  modified_base 2: mod_base = OTHER; note = 2'-deoxy-2'-fluoroadenosine-3'-phosphorothioate
  modified_base 3: mod_base = OTHER; note = 2'-O-methyluridine-3'-phosphate
  modified_base 4: mod_base = OTHER; note = 2'-O-methylguanosine-3'-phosphate
  modified_base 5: mod_base = OTHER; note = 2'-O-methyladenosine-3'-phosphate
  modified_base 6: mod_base = OTHER; note = 2'-deoxy-2'-fluorouridine-3'-phosphate
  modified_base 7: mod_base = OTHER; note = 2'-O-methylguanosine-3'-phosphate
  modified_base 8: mod_base = OTHER; note = 2'-deoxy-2'-fluoroadenosine-3'-phosphate
  modified_base 9: mod_base = OTHER; note = 2'-deoxy-2'-fluorouridine-3'-phosphate
  modified_base 10: mod_base = OTHER; note = 2'-O-methylguanosine-3'-phosphate
  modified_base 11: mod_base = OTHER; note = 2'-O-methyladenosine-3'-phosphate
  modified_base 12: mod_base = OTHER; note = 2'-O-methyladenosine-3'-phosphate
  modified_base 13: mod_base = OTHER; note = 2'-O-methylguanosine-3'-phosphate
  modified_base 14: mod_base = OTHER; note = 2'-deoxy-2'-fluorocytidine-3'-phosphate
  modified_base 15: mod_base = OTHER; note = 2'-O-methylcytidine-3'-phosphate
  modified_base 16: mod_base = OTHER; note = 2'-deoxy-2'-fluorouridine-3'-phosphate
  modified_base 17: mod_base = OTHER; note = 2'-O-methylguanosine-3'-phosphate
  modified_base 18: mod_base = OTHER; note = 2'-O-methyladenosine-3'-phosphate
  modified_base 19: mod_base = OTHER; note = 2'-O-methyladenosine-3'-phosphate
  modified_base 20: mod_base = OTHER; note = 2'-O-methylcytidine-3'-phosphate
  modified_base 21: mod_base = OTHER; note = 2'-O-methyluridine-3'-phosphorothioate
  modified_base 22: mod_base = OTHER; note = 2'-O-methylguanosine-3'-phosphorothioate
  modified_base 23: mod_base = OTHER; note = 2'-O-methylguanosine
aatgatgatgaagcctgaactgg

SEQ ID NO: 1173 - RNA, 23 nt, synthetic construct
  source 1..23: mol_type = other RNA
  modified_base 1: mod_base = OTHER; note = 2'-O-methyladenosine-3'-phosphorothioate
  modified_base 2: mod_base = OTHER; note = 2'-deoxy-2'-fluoroguanosine-3'-phosphorothioate
  modified_base 3: mod_base = OTHER; note = 2'-O-methyladenosine-3'-phosphate
  modified_base 4: mod_base = OTHER; note = 2'-O-methylguanosine-3'-phosphate
  modified_base 5: mod_base = OTHER; note = 2'-O-methyladenosine-3'-phosphate
  modified_base 6: mod_base = OTHER; note = 2'-deoxy-2'-fluorocytidine-3'-phosphate
  modified_base 7: mod_base = OTHER; note = 2'-O-methyladenosine-3'-phosphate
  modified_base 8: mod_base = OTHER; note = 2'-deoxy-2'-fluorouridine-3'-phosphate
  modified_base 9: mod_base = OTHER; note = 2'-deoxy-2'-fluoroguanosine-3'-phosphate
  modified_base 10: mod_base = OTHER; note = 2'-O-methyladenosine-3'-phosphate
  modified_base 11: mod_base = OTHER; note = 2'-O-methyluridine-3'-phosphate
  modified_base 12: mod_base = OTHER; note = 2'-O-methylguanosine-3'-phosphate
  modified_base 13: mod_base = OTHER; note = 2'-O-methyladenosine-3'-phosphate
  modified_base 14: mod_base = OTHER; note = 2'-deoxy-2'-fluorouridine-3'-phosphate
  modified_base 15: mod_base = OTHER; note = 2'-O-methylguanosine-3'-phosphate
  modified_base 16: mod_base = OTHER; note = 2'-deoxy-2'-fluoroadenosine-3'-phosphate
  modified_base 17: mod_base = OTHER; note = 2'-O-methyladenosine-3'-phosphate
  modified_base 18: mod_base = OTHER; note = 2'-O-methylguanosine-3'-phosphate
  modified_base 19: mod_base = OTHER; note = 2'-O-methylcytidine-3'-phosphate
  modified_base 20: mod_base = OTHER; note = 2'-O-methylcytidine-3'-phosphate
  modified_base 21: mod_base = OTHER; note = 2'-O-methyluridine-3'-phosphorothioate
  modified_base 22: mod_base = OTHER; note = 2'-O-methylguanosine-3'-phosphorothioate
  modified_base 23: mod_base = OTHER; note = 2'-O-methyladenosine
agagacatgatgatgaagcctga

SEQ ID NO: 1174 - RNA, 23 nt, synthetic construct
  source 1..23: mol_type = other RNA
  modified_base 1: mod_base = OTHER; note = 2'-O-methyladenosine-3'-phosphorothioate
  modified_base 2: mod_base = OTHER; note = 2'-deoxy-2'-fluorocytidine-3'-phosphorothioate
  modified_base 3: mod_base = OTHER; note = 2'-O-methyluridine-3'-phosphate
  modified_base 4: mod_base = OTHER; note = 2'-O-methyluridine-3'-phosphate
  modified_base 5: mod_base = OTHER; note = 2'-O-methylcytidine-3'-phosphate
  modified_base 6: mod_base = OTHER; note = 2'-deoxy-2'-fluoroadenosine-3'-phosphate
  modified_base 7: mod_base = OTHER; note = 2'-O-methylguanosine-3'-phosphate
  modified_base 8: mod_base = OTHER; note = 2'-deoxy-2'-fluoroadenosine-3'-phosphate
  modified_base 9: mod_base = OTHER; note = 2'-deoxy-2'-fluoroguanosine-3'-phosphate
  modified_base 10: mod_base = OTHER; note = 2'-O-methyladenosine-3'-phosphate
  modified_base 11: mod_base = OTHER; note = 2'-O-methylcytidine-3'-phosphate
  modified_base 12: mod_base = OTHER; note = 2'-O-methyladenosine-3'-phosphate
  modified_base 13: mod_base = OTHER; note = 2'-O-methyluridine-3'-phosphate
  modified_base 14: mod_base = OTHER; note = 2'-deoxy-2'-fluoroguanosine-3'-phosphate
  modified_base 15: mod_base = OTHER; note = 2'-O-methyladenosine-3'-phosphate
  modified_base 16: mod_base = OTHER; note = 2'-deoxy-2'-fluorouridine-3'-phosphate
  modified_base 17: mod_base = OTHER; note = 2'-O-methylguanosine-3'-phosphate
  modified_base 18: mod_base = OTHER; note = 2'-O-methyladenosine-3'-phosphate
  modified_base 19: mod_base = OTHER; note = 2'-O-methyluridine-3'-phosphate
  modified_base 20: mod_base = OTHER; note = 2'-O-methylguanosine-3'-phosphate
  modified_base 21: mod_base = OTHER; note = 2'-O-methyladenosine-3'-phosphorothioate
  modified_base 22: mod_base = OTHER; note = 2'-O-methyladenosine-3'-phosphorothioate
  modified_base 23: mod_base = OTHER; note = 2'-O-methylguanosine
acttcagagacatgatgatgaag

SEQ ID NO: 1175 - RNA, 23 nt, synthetic construct
  source 1..23: mol_type = other RNA
  modified_base 1: mod_base = OTHER; note = 2'-O-methyladenosine-3'-phosphorothioate
  modified_base 2: mod_base = OTHER; note = 2'-deoxy-2'-fluoroadenosine-3'-phosphorothioate
  modified_base 3: mod_base = OTHER; note = 2'-O-methylcytidine-3'-phosphate
  modified_base 4: mod_base = OTHER; note = 2'-O-methyluridine-3'-phosphate
  modified_base 5: mod_base = OTHER; note = 2'-O-methylguanosine-3'-phosphate
  modified_base 6: mod_base = OTHER; note = 2'-deoxy-2'-fluorouridine-3'-phosphate
  modified_base 7: mod_base = OTHER; note = 2'-O-methylcytidine-3'-phosphate
  modified_base 8: mod_base = OTHER; note = 2'-deoxy-2'-fluorouridine-3'-phosphate
  modified_base 9: mod_base = OTHER; note = 2'-deoxy-2'-fluorouridine-3'-phosphate
  modified_base 10: mod_base = OTHER; note = 2'-O-methylcytidine-3'-phosphate
  modified_base 11: mod_base = OTHER; note = 2'-O-methyladenosine-3'-phosphate
  modified_base 12: mod_base = OTHER; note = 2'-O-methylguanosine-3'-phosphate
  modified_base 13: mod_base = OTHER; note = 2'-O-methyladenosine-3'-phosphate
  modified_base 14: mod_base = OTHER; note = 2'-deoxy-2'-fluoroguanosine-3'-phosphate
  modified_base 15: mod_base = OTHER; note = 2'-O-methyladenosine-3'-phosphate
  modified_base 16: mod_base = OTHER; note = 2'-deoxy-2'-fluorocytidine-3'-phosphate
  modified_base 17: mod_base = OTHER; note = 2'-O-methyladenosine-3'-phosphate
  modified_base 18: mod_base = OTHER; note = 2'-O-methyluridine-3'-phosphate
  modified_base 19: mod_base = OTHER; note = 2'-O-methylguanosine-3'-phosphate
  modified_base 20: mod_base = OTHER; note = 2'-O-methyladenosine-3'-phosphate
  modified_base 21: mod_base = OTHER; note = 2'-O-methyluridine-3'-phosphorothioate
  modified_base 22: mod_base = OTHER; note = 2'-O-methylguanosine-3'-phosphorothioate
  modified_base 23: mod_base = OTHER; note = 2'-O-methyladenosine
aactgtcttcagagacatgatga

SEQ ID NO: 1176 - RNA, 23 nt, synthetic construct
  source 1..23: mol_type = other RNA
  modified_base 1: mod_base = OTHER; note = 2'-O-methyladenosine-3'-phosphorothioate
  modified_base 2: mod_base = OTHER; note = 2'-deoxy-2'-fluoroadenosine-3'-phosphorothioate
  modified_base 3: mod_base = OTHER; note = 2'-O-methylcytidine-3'-phosphate
  modified_base 4: mod_base = OTHER; note = 2'-O-methyluridine-3'-phosphate
  modified_base 5: mod_base = OTHER; note = 2'-O-methylguanosine-3'-phosphate
  modified_base 6: mod_base = OTHER; note = 2'-deoxy-2'-fluorocytidine-3'-phosphate
  modified_base 7: mod_base = OTHER; note = 2'-O-methylcytidine-3'-phosphate
  modified_base 8: mod_base = OTHER; note = 2'-deoxy-2'-fluoroadenosine-3'-phosphate
  modified_base 9: mod_base = OTHER; note = 2'-deoxy-2'-fluorocytidine-3'-phosphate
  modified_base 10: mod_base = OTHER; note = 2'-O-methyluridine-3'-phosphate
  modified_base 11: mod_base = OTHER; note = 2'-O-methylguanosine-3'-phosphate
  modified_base 12: mod_base = OTHER; note = 2'-O-methyluridine-3'-phosphate
  modified_base 13: mod_base = OTHER; note = 2'-O-methylcytidine-3'-phosphate
  modified_base 14: mod_base = OTHER; note = 2'-deoxy-2'-fluorouridine-3'-phosphate
  modified_base 15: mod_base = OTHER; note = 2'-O-methyluridine-3'-phosphate
  modified_base 16: mod_base = OTHER; note = 2'-deoxy-2'-fluorocytidine-3'-phosphate
  modified_base 17: mod_base = OTHER; note = 2'-O-methyladenosine-3'-phosphate
  modified_base 18: mod_base = OTHER; note = 2'-O-methylguanosine-3'-phosphate
  modified_base 19: mod_base = OTHER; note = 2'-O-methyladenosine-3'-phosphate
  modified_base 20: mod_base = OTHER; note = 2'-O-methylguanosine-3'-phosphate
  modified_base 21: mod_base = OTHER; note = 2'-O-methyladenosine-3'-phosphorothioate
  modified_base 22: mod_base = OTHER; note = 2'-O-methylcytidine-3'-phosphorothioate
  modified_base 23: mod_base = OTHER; note = 2'-O-methyladenosine
aactgccactgtcttcagagaca

SEQ ID NO: 1177 - RNA, 23 nt, synthetic construct
  source 1..23: mol_type = other RNA
  modified_base 1: mod_base = OTHER; note = 2'-O-methyladenosine-3'-phosphorothioate
  modified_base 2: mod_base = OTHER; note = 2'-deoxy-2'-fluoroguanosine-3'-phosphorothioate
  modified_base 3: mod_base = OTHER; note = 2'-O-methylcytidine-3'-phosphate
  modified_base 4: mod_base = OTHER; note = 2'-O-methyladenosine-3'-phosphate
  modified_base 5: mod_base = OTHER; note = 2'-O-methylguanosine-3'-phosphate
  modified_base 6: mod_base = OTHER; note = 2'-deoxy-2'-fluoroguanosine-3'-phosphate
  modified_base 7: mod_base = OTHER; note = 2'-O-methylguanosine-3'-phosphate
  modified_base 8: mod_base = OTHER; note = 2'-deoxy-2'-fluorocytidine-3'-phosphate
  modified_base 9: mod_base = OTHER; note = 2'-deoxy-2'-fluoroguanosine-3'-phosphate
  modified_base 10: mod_base = OTHER; note = 2'-O-methyladenosine-3'-phosphate
  modified_base 11: mod_base = OTHER; note = 2'-O-methyluridine-3'-phosphate
  modified_base 12: mod_base = OTHER; note = 2'-O-methylcytidine-3'-phosphate
  modified_base 13: mod_base = OTHER; note = 2'-O-methyladenosine-3'-phosphate
  modified_base 14: mod_base = OTHER; note = 2'-deoxy-2'-fluorocytidine-3'-phosphate
  modified_base 15: mod_base = OTHER; note = 2'-O-methyluridine-3'-phosphate
  modified_base 16: mod_base = OTHER; note = 2'-deoxy-2'-fluoroguanosine-3'-phosphate
  modified_base 17: mod_base = OTHER; note = 2'-O-methylcytidine-3'-phosphate
  modified_base 18: mod_base = OTHER; note = 2'-O-methylcytidine-3'-phosphate
  modified_base 19: mod_base = OTHER; note = 2'-O-methyladenosine-3'-phosphate
  modified_base 20: mod_base = OTHER; note = 2'-O-methylcytidine-3'-phosphate
  modified_base 21: mod_base = OTHER; note = 2'-O-methyluridine-3'-phosphorothioate
  modified_base 22: mod_base = OTHER; note = 2'-O-methylguanosine-3'-phosphorothioate
  modified_base 23: mod_base = OTHER; note = 2'-O-methyluridine
agcagggcgatcactgccactgt

SEQ ID NO: 1178 - RNA, 23 nt, synthetic construct
  source 1..23: mol_type = other RNA
  modified_base 1: mod_base = OTHER; note = 2'-O-methyladenosine-3'-phosphorothioate
  modified_base 2: mod_base = OTHER; note = 2'-deoxy-2'-fluoroadenosine-3'-phosphorothioate
  modified_base 3: mod_base = OTHER; note = 2'-O-methyladenosine-3'-phosphate
  modified_base 4: mod_base = OTHER; note = 2'-O-methylcytidine-3'-phosphate
  modified_base 5: mod_base = OTHER; note = 2'-O-methyladenosine-3'-phosphate
  modified_base 6: mod_base = OTHER; note = 2'-deoxy-2'-fluorocytidine-3'-phosphate
  modified_base 7: mod_base = OTHER; note = 2'-O-methylcytidine-3'-phosphate
  modified_base 8: mod_base = OTHER; note = 2'-deoxy-2'-fluoroadenosine-3'-phosphate
  modified_base 9: mod_base = OTHER; note = 2'-deoxy-2'-fluorouridine-3'-phosphate
  modified_base 10: mod_base = OTHER; note = 2'-O-methylcytidine-3'-phosphate
  modified_base 11: mod_base = OTHER; note = 2'-O-methylcytidine-3'-phosphate
  modified_base 12: mod_base = OTHER; note = 2'-O-methylguanosine-3'-phosphate
  modified_base 13: mod_base = OTHER; note = 2'-O-methylguanosine-3'-phosphate
  modified_base 14: mod_base = OTHER; note = 2'-deoxy-2'-fluoroadenosine-3'-phosphate
  modified_base 15: mod_base = OTHER; note = 2'-O-methylguanosine-3'-phosphate
  modified_base 16: mod_base = OTHER; note = 2'-deoxy-2'-fluorocytidine-3'-phosphate
  modified_base 17: mod_base = OTHER; note = 2'-O-methylcytidine-3'-phosphate
  modified_base 18: mod_base = OTHER; note = 2'-O-methylguanosine-3'-phosphate
  modified_base 19: mod_base = OTHER; note = 2'-O-methylguanosine-3'-phosphate
  modified_base 20: mod_base = OTHER; note = 2'-O-methyluridine-3'-phosphate
  modified_base 21: mod_base = OTHER; note = 2'-O-methylguanosine-3'-phosphorothioate
  modified_base 22: mod_base = OTHER; note = 2'-O-methylcytidine-3'-phosphorothioate
  modified_base 23: mod_base = OTHER; note = 2'-O-methyladenosine
aaacaccatccggagccggtgca

SEQ ID NO: 1179 - RNA, 23 nt, synthetic construct
  source 1..23: mol_type = other RNA
  modified_base 1: mod_base = OTHER; note = 2'-O-methyladenosine-3'-phosphorothioate
  modified_base 2: mod_base = OTHER; note = 2'-deoxy-2'-fluoroadenosine-3'-phosphorothioate
  modified_base 3: mod_base = OTHER; note = 2'-O-methylguanosine-3'-phosphate
  modified_base 4: mod_base = OTHER; note = 2'-O-methylguanosine-3'-phosphate
  modified_base 5: mod_base = OTHER; note = 2'-O-methylcytidine-3'-phosphate
  modified_base 6: mod_base = OTHER; note = 2'-deoxy-2'-fluorocytidine-3'-phosphate
  modified_base 7: mod_base = OTHER; note = 2'-O-methylguanosine-3'-phosphate
  modified_base 8: mod_base = OTHER; note = 2'-deoxy-2'-fluorouridine-3'-phosphate
  modified_base 9: mod_base = OTHER; note = 2'-deoxy-2'-fluoroguanosine-3'-phosphate
  modified_base 10: mod_base = OTHER; note = 2'-O-methylcytidine-3'-phosphate
  modified_base 11: mod_base = OTHER; note = 2'-O-methylguanosine-3'-phosphate
  modified_base 12: mod_base = OTHER; note = 2'-O-methyladenosine-3'-phosphate
  modified_base 13: mod_base = OTHER; note = 2'-O-methyluridine-3'-phosphate
  modified_base 14: mod_base = OTHER; note = 2'-deoxy-2'-fluorouridine-3'-phosphate
  modified_base 15: mod_base = OTHER; note = 2'-O-methyladenosine-3'-phosphate
  modified_base 16: mod_base = OTHER; note = 2'-deoxy-2'-fluoroguanosine-3'-phosphate
  modified_base 17: mod_base = OTHER; note = 2'-O-methylguanosine-3'-phosphate
  modified_base 18: mod_base = OTHER; note = 2'-O-methylcytidine-3'-phosphate
  modified_base 19: mod_base = OTHER; note = 2'-O-methyluridine-3'-phosphate
  modified_base 20: mod_base = OTHER; note = 2'-O-methylguanosine-3'-phosphate
  modified_base 21: mod_base = OTHER; note = 2'-O-methyluridine-3'-phosphorothioate
  modified_base 22: mod_base = OTHER; note = 2'-O-methyluridine-3'-phosphorothioate
  modified_base 23: mod_base = OTHER; note = 2'-O-methyluridine
aaggccgtgcgattaggctgttt

SEQ ID NO: 1180 - RNA, 23 nt, synthetic construct
  source 1..23: mol_type = other RNA
  modified_base 1: mod_base = OTHER; note = 2'-O-methyladenosine-3'-phosphorothioate
  modified_base 2: mod_base = OTHER; note = 2'-deoxy-2'-fluoroadenosine-3'-phosphorothioate
  modified_base 3: mod_base = OTHER; note = 2'-O-methyladenosine-3'-phosphate
  modified_base 4: mod_base = OTHER; note = 2'-O-methyladenosine-3'-phosphate
  modified_base 5: mod_base = OTHER; note = 2'-O-methylguanosine-3'-phosphate
  modified_base 6: mod_base = OTHER; note = 2'-deoxy-2'-fluoroguanosine-3'-phosphate
  modified_base 7: mod_base = OTHER; note = 2'-O-methyladenosine-3'-phosphate
  modified_base 8: mod_base = OTHER; note = 2'-deoxy-2'-fluoroguanosine-3'-phosphate
  modified_base 9: mod_base = OTHER; note = 2'-deoxy-2'-fluoroguanosine-3'-phosphate
  modified_base 10: mod_base = OTHER; note = 2'-O-methylcytidine-3'-phosphate
  modified_base 11: mod_base = OTHER; note = 2'-O-methylcytidine-3'-phosphate
  modified_base 12: mod_base = OTHER; note = 2'-O-methylguanosine-3'-phosphate
  modified_base 13: mod_base = OTHER; note = 2'-O-methyluridine-3'-phosphate
  modified_base 14: mod_base = OTHER; note = 2'-deoxy-2'-fluoroguanosine-3'-phosphate
  modified_base 15: mod_base = OTHER; note = 2'-O-methylcytidine-3'-phosphate
  modified_base 16: mod_base = OTHER; note = 2'-deoxy-2'-fluoroguanosine-3'-phosphate
  modified_base 17: mod_base = OTHER; note = 2'-O-methyladenosine-3'-phosphate
  modified_base 18: mod_base = OTHER; note = 2'-O-methyluridine-3'-phosphate
  modified_base 19: mod_base = OTHER; note = 2'-O-methyluridine-3'-phosphate
  modified_base 20: mod_base = OTHER; note = 2'-O-methyladenosine-3'-phosphate
  modified_base 21: mod_base = OTHER; note = 2'-O-methylguanosine-3'-phosphorothioate
  modified_base 22: mod_base = OTHER; note = 2'-O-methylguanosine-3'-phosphorothioate
  modified_base 23: mod_base = OTHER; note = 2'-O-methylcytidine
aaaaggaggccgtgcgattaggc

SEQ ID NO: 1181 - RNA, 23 nt, synthetic construct
  source 1..23: mol_type = other RNA
  modified_base 1: mod_base = OTHER; note = 2'-O-methyladenosine-3'-phosphorothioate
  modified_base 2: mod_base = OTHER; note = 2'-deoxy-2'-fluorocytidine-3'-phosphorothioate
  modified_base 3: mod_base = OTHER; note = 2'-O-methyladenosine-3'-phosphate
  modified_base 4: mod_base = OTHER; note = 2'-O-methylguanosine-3'-phosphate
  modified_base 5: mod_base = OTHER; note = 2'-O-methylguanosine-3'-phosphate
  modified_base 6: mod_base = OTHER; note = 2'-deoxy-2'-fluoroguanosine-3'-phosphate
  modified_base 7: mod_base = OTHER; note = 2'-O-methyladenosine-3'-phosphate
  modified_base 8: mod_base = OTHER; note = 2'-deoxy-2'-fluoroadenosine-3'-phosphate
  modified_base 9: mod_base = OTHER; note = 2'-deoxy-2'-fluoroadenosine-3'-phosphate
  modified_base 10: mod_base = OTHER; note = 2'-O-methylguanosine-3'-phosphate
  modified_base 11: mod_base = OTHER; note = 2'-O-methylguanosine-3'-phosphate
  modified_base 12: mod_base = OTHER; note = 2'-O-methyladenosine-3'-phosphate
  modified_base 13: mod_base = OTHER; note = 2'-O-methylguanosine-3'-phosphate
  modified_base 14: mod_base = OTHER; note = 2'-deoxy-2'-fluoroguanosine-3'-phosphate
  modified_base 15: mod_base = OTHER; note = 2'-O-methylcytidine-3'-phosphate
  modified_base 16: mod_base = OTHER; note = 2'-deoxy-2'-fluorocytidine-3'-phosphate
  modified_base 17: mod_base = OTHER; note = 2'-O-methylguanosine-3'-phosphate
  modified_base 18: mod_base = OTHER; note = 2'-O-methyluridine-3'-phosphate
  modified_base 19: mod_base = OTHER; note = 2'-O-methylguanosine-3'-phosphate
  modified_base 20: mod_base = OTHER; note = 2'-O-methylcytidine-3'-phosphate
  modified_base 21: mod_base = OTHER; note = 2'-O-methylguanosine-3'-phosphorothioate
  modified_base 22: mod_base = OTHER; note = 2'-O-methyladenosine-3'-phosphorothioate
  modified_base 23: mod_base = OTHER; note = 2'-O-methyluridine
acagggaaaggaggccgtgcgat

SEQ ID NO: 1182 - RNA, 23 nt, synthetic construct
  source 1..23: mol_type = other RNA
  modified_base 1: mod_base = OTHER; note = 2'-O-methyladenosine-3'-phosphorothioate
  modified_base 2: mod_base = OTHER; note = 2'-deoxy-2'-fluorouridine-3'-phosphorothioate
  modified_base 3: mod_base = OTHER; note = 2'-O-methyladenosine-3'-phosphate
  modified_base 4: mod_base = OTHER; note = 2'-O-methylcytidine-3'-phosphate
  modified_base 5: mod_base = OTHER; note = 2'-O-methylguanosine-3'-phosphate
  modified_base 6: mod_base = OTHER; note = 2'-deoxy-2'-fluoroguanosine-3'-phosphate
  modified_base 7: mod_base = OTHER; note = 2'-O-methyluridine-3'-phosphate
  modified_base 8: mod_base = OTHER; note = 2'-deoxy-2'-fluoroguanosine-3'-phosphate
  modified_base 9: mod_base = OTHER; note = 2'-deoxy-2'-fluorocytidine-3'-phosphate
  modified_base 10: mod_base = OTHER; note = 2'-O-methyladenosine-3'-phosphate
  modified_base 11: mod_base = OTHER; note = 2'-O-methylguanosine-3'-phosphate
  modified_base 12: mod_base = OTHER; note = 2'-O-methylguanosine-3'-phosphate
  modified_base 13: mod_base = OTHER; note = 2'-O-methylguanosine-3'-phosphate
  modified_base 14: mod_base = OTHER; note = 2'-deoxy-2'-fluoroadenosine-3'-phosphate
  modified_base 15: mod_base = OTHER; note = 2'-O-methyladenosine-3'-phosphate
  modified_base 16: mod_base = OTHER; note = 2'-deoxy-2'-fluoroadenosine-3'-phosphate
  modified_base 17: mod_base = OTHER; note = 2'-O-methylguanosine-3'-phosphate
  modified_base 18: mod_base = OTHER; note = 2'-O-methylguanosine-3'-phosphate
  modified_base 19: mod_base = OTHER; note = 2'-O-methyladenosine-3'-phosphate
  modified_base 20: mod_base = OTHER; note = 2'-O-methylguanosine-3'-phosphate
  modified_base 21: mod_base = OTHER; note = 2'-O-methylguanosine-3'-phosphorothioate
  modified_base 22: mod_base = OTHER; note = 2'-O-methylcytidine-3'-phosphorothioate
  modified_base 23: mod_base = OTHER; note = 2'-O-methylcytidine
atacggtgcagggaaaggaggcc

SEQ ID NO: 1183 - RNA, 23 nt, synthetic construct
  source 1..23: mol_type = other RNA
  modified_base 1: mod_base = OTHER; note = 2'-O-methyladenosine-3'-phosphorothioate
  modified_base 2: mod_base = OTHER; note = 2'-deoxy-2'-fluoroadenosine-3'-phosphorothioate
  modified_base 3: mod_base = OTHER; note = 2'-O-methylguanosine-3'-phosphate
  modified_base 4: mod_base = OTHER; note = 2'-O-methylguanosine-3'-phosphate
  modified_base 5: mod_base = OTHER; note = 2'-O-methyladenosine-3'-phosphate
  modified_base 6: mod_base = OTHER; note = 2'-deoxy-2'-fluoroguanosine-3'-phosphate
  modified_base 7: mod_base = OTHER; note = 2'-O-methyluridine-3'-phosphate
  modified_base 8: mod_base = OTHER; note = 2'-deoxy-2'-fluoroadenosine-3'-phosphate
  modified_base 9: mod_base = OTHER; note = 2'-deoxy-2'-fluorocytidine-3'-phosphate
  modified_base 10: mod_base = OTHER; note = 2'-O-methylguanosine-3'-phosphate
  modified_base 11: mod_base = OTHER; note = 2'-O-methylguanosine-3'-phosphate
  modified_base 12: mod_base = OTHER; note = 2'-O-methyluridine-3'-phosphate
  modified_base 13: mod_base = OTHER; note = 2'-O-methylguanosine-3'-phosphate
  modified_base 14: mod_base = OTHER; note = 2'-deoxy-2'-fluorocytidine-3'-phosphate
  modified_base 15: mod_base = OTHER; note = 2'-O-methyladenosine-3'-phosphate
  modified_base 16: mod_base = OTHER; note = 2'-deoxy-2'-fluoroguanosine-3'-phosphate
  modified_base 17: mod_base = OTHER; note = 2'-O-methylguanosine-3'-phosphate
  modified_base 18: mod_base = OTHER; note = 2'-O-methylguanosine-3'-phosphate
  modified_base 19: mod_base = OTHER; note = 2'-O-methyladenosine-3'-phosphate
  modified_base 20: mod_base = OTHER; note = 2'-O-methyladenosine-3'-phosphate
  modified_base 21: mod_base = OTHER; note = 2'-O-methyladenosine-3'-phosphorothioate
  modified_base 22: mod_base = OTHER; note = 2'-O-methylguanosine-3'-phosphorothioate
  modified_base 23: mod_base = OTHER; note = 2'-O-methylguanosine
aaggagtacggtgcagggaaagg

SEQ ID NO: 1184 - RNA, 23 nt, synthetic construct
  source 1..23: mol_type = other RNA
  modified_base 1: mod_base = OTHER; note = 2'-O-methyladenosine-3'-phosphorothioate
  modified_base 2: mod_base = OTHER; note = 2'-deoxy-2'-fluoroadenosine-3'-phosphorothioate
  modified_base 3: mod_base = OTHER; note = 2'-O-methylguanosine-3'-phosphate
  modified_base 4: mod_base = OTHER; note = 2'-O-methylguanosine-3'-phosphate
  modified_base 5: mod_base = OTHER; note = 2'-O-methylguanosine-3'-phosphate
  modified_base 6: mod_base = OTHER; note = 2'-deoxy-2'-fluorouridine-3'-phosphate
  modified_base 7: mod_base = OTHER; note = 2'-O-methylguanosine-3'-phosphate
  modified_base 8: mod_base = OTHER; note = 2'-deoxy-2'-fluoroadenosine-3'-phosphate
  modified_base 9: mod_base = OTHER; note = 2'-deoxy-2'-fluoroguanosine-3'-phosphate
  modified_base 10: mod_base = OTHER; note = 2'-O-methylguanosine-3'-phosphate
  modified_base 11: mod_base = OTHER; note = 2'-O-methyladenosine-3'-phosphate
  modified_base 12: mod_base = OTHER; note = 2'-O-methylguanosine-3'-phosphate
  modified_base 13: mod_base = OTHER; note = 2'-O-methyluridine-3'-phosphate
  modified_base 14: mod_base = OTHER; note = 2'-deoxy-2'-fluoroadenosine-3'-phosphate
  modified_base 15: mod_base = OTHER; note = 2'-O-methylcytidine-3'-phosphate
  modified_base 16: mod_base = OTHER; note = 2'-deoxy-2'-fluoroguanosine-3'-phosphate
  modified_base 17: mod_base = OTHER; note = 2'-O-methylguanosine-3'-phosphate
  modified_base 18: mod_base = OTHER; note = 2'-O-methyluridine-3'-phosphate
  modified_base 19: mod_base = OTHER; note = 2'-O-methylguanosine-3'-phosphate
  modified_base 20: mod_base = OTHER; note = 2'-O-methylcytidine-3'-phosphate
  modified_base 21: mod_base = OTHER; note = 2'-O-methyladenosine-3'-phosphorothioate
  modified_base 22: mod_base = OTHER; note = 2'-O-methylguanosine-3'-phosphorothioate
  modified_base 23: mod_base = OTHER; note = 2'-O-methylguanosine
aagggtgaggagtacggtgcagg

SEQ ID NO: 1185 - RNA, 23 nt, synthetic construct
  source 1..23: mol_type = other RNA
  modified_base 1: mod_base = OTHER; note = 2'-O-methyladenosine-3'-phosphorothioate
  modified_base 2: mod_base = OTHER; note = 2'-deoxy-2'-fluoroadenosine-3'-phosphorothioate
  modified_base 3: mod_base = OTHER; note = 2'-O-methylguanosine-3'-phosphate
  modified_base 4: mod_base = OTHER; note = 2'-O-methyladenosine-3'-phosphate
  modified_base 5: mod_base = OTHER; note = 2'-O-methylguanosine-3'-phosphate
  modified_base 6: mod_base = OTHER; note = 2'-deoxy-2'-fluoroadenosine-3'-phosphate
  modified_base 7: mod_base = OTHER; note = 2'-O-methyladenosine-3'-phosphate
  modified_base 8: mod_base = OTHER; note = 2'-deoxy-2'-fluoroguanosine-3'-phosphate
  modified_base 9: mod_base = OTHER; note = 2'-deoxy-2'-fluorocytidine-3'-phosphate
  modified_base 10: mod_base = OTHER; note = 2'-O-methyladenosine-3'-phosphate
  modified_base 11: mod_base = OTHER; note = 2'-O-methylguanosine-3'-phosphate
  modified_base 12: mod_base = OTHER; note = 2'-O-methylguanosine-3'-phosphate
  modified_base 13: mod_base = OTHER; note = 2'-O-methylguanosine-3'-phosphate
  modified_base 14: mod_base = OTHER; note = 2'-deoxy-2'-fluorouridine-3'-phosphate
  modified_base 15: mod_base = OTHER; note = 2'-O-methylguanosine-3'-phosphate
  modified_base 16: mod_base = OTHER; note = 2'-deoxy-2'-fluoroadenosine-3'-phosphate
  modified_base 17: mod_base = OTHER; note = 2'-O-methylguanosine-3'-phosphate
  modified_base 18: mod_base = OTHER; note = 2'-O-methylguanosine-3'-phosphate
  modified_base 19: mod_base = OTHER; note = 2'-O-methyladenosine-3'-phosphate
  modified_base 20: mod_base = OTHER; note = 2'-O-methylguanosine-3'-phosphate
  modified_base 21: mod_base = OTHER; note = 2'-O-methyluridine-3'-phosphorothioate
  modified_base 22: mod_base = OTHER; note = 2'-O-methyladenosine-3'-phosphorothioate
  modified_base 23: mod_base = OTHER; note = 2'-O-methylcytidine
aagagaagcagggtgaggagtac

SEQ ID NO: 1186 - RNA, 23 nt, synthetic construct
  source 1..23: mol_type = other RNA
  modified_base 1: mod_base = OTHER; note = 2'-O-methyladenosine-3'-phosphorothioate
  modified_base 2: mod_base = OTHER; note = 2'-deoxy-2'-fluoroguanosine-3'-phosphorothioate
  modified_base 3: mod_base = OTHER; note = 2'-O-methyluridine-3'-phosphate
  modified_base 4: mod_base = OTHER; note = 2'-O-methylguanosine-3'-phosphate
  modified_base 5: mod_base = OTHER; note = 2'-O-methylguanosine-3'-phosphate
  modified_base 6: mod_base = OTHER; note = 2'-deoxy-2'-fluorocytidine-3'-phosphate
  modified_base 7: mod_base = OTHER; note = 2'-O-methylcytidine-3'-phosphate
  modified_base 8: mod_base = OTHER; note = 2'-deoxy-2'-fluorocytidine-3'-phosphate
  modified_base 9: mod_base = OTHER; note = 2'-deoxy-2'-fluoroadenosine-3'-phosphate
  modified_base 10: mod_base = OTHER; note = 2'-O-methylguanosine-3'-phosphate
  modified_base 11: mod_base = OTHER; note = 2'-O-methyladenosine-3'-phosphate
  modified_base 12: mod_base = OTHER; note = 2'-O-methylguanosine-3'-phosphate
  modified_base 13: mod_base = OTHER; note = 2'-O-methyladenosine-3'-phosphate
  modified_base 14: mod_base = OTHER; note = 2'-deoxy-2'-fluoroadenosine-3'-phosphate
  modified_base 15: mod_base = OTHER; note = 2'-O-methylguanosine-3'-phosphate
  modified_base 16: mod_base = OTHER; note = 2'-deoxy-2'-fluorocytidine-3'-phosphate
  modified_base 17: mod_base = OTHER; note = 2'-O-methyladenosine-3'-phosphate
  modified_base 18: mod_base = OTHER; note = 2'-O-methylguanosine-3'-phosphate
  modified_base 19: mod_base = OTHER; note = 2'-O-methylguanosine-3'-phosphate
  modified_base 20: mod_base = OTHER; note = 2'-O-methylguanosine-3'-phosphate
  modified_base 21: mod_base = OTHER; note = 2'-O-methyluridine-3'-phosphorothioate
  modified_base 22: mod_base = OTHER; note = 2'-O-methylguanosine-3'-phosphorothioate
  modified_base 23: mod_base = OTHER; note = 2'-O-methyladenosine
agtggcccagagaagcagggtga

SEQ ID NO: 1187 - RNA, 23 nt, synthetic construct
  source 1..23: mol_type = other RNA
  modified_base 1: mod_base = OTHER; note = 2'-O-methyladenosine-3'-phosphorothioate
  modified_base 2: mod_base = OTHER; note = 2'-deoxy-2'-fluoroadenosine-3'-phosphorothioate
  modified_base 3: mod_base = OTHER; note = 2'-O-methyladenosine-3'-phosphate
  modified_base 4: mod_base = OTHER; note = 2'-O-methyladenosine-3'-phosphate
  modified_base 5: mod_base = OTHER; note = 2'-O-methylcytidine-3'-phosphate
  modified_base 6: mod_base = OTHER; note = 2'-deoxy-2'-fluorouridine-3'-phosphate
  modified_base 7: mod_base = OTHER; note = 2'-O-methylguanosine-3'-phosphate
  modified_base 8: mod_base = OTHER; note = 2'-deoxy-2'-fluoroguanosine-3'-phosphate
  modified_base 9: mod_base = OTHER; note = 2'-deoxy-2'-fluorouridine-3'-phosphate
  modified_base 10: mod_base = OTHER; note = 2'-O-methylguanosine-3'-phosphate
  modified_base 11: mod_base = OTHER; note = 2'-O-methylguanosine-3'-phosphate
  modified_base 12: mod_base = OTHER; note = 2'-O-methylcytidine-3'-phosphate
  modified_base 13: mod_base = OTHER; note = 2'-O-methylcytidine-3'-phosphate
  modified_base 14: mod_base = OTHER; note = 2'-deoxy-2'-fluorocytidine-3'-phosphate
  modified_base 15: mod_base = OTHER; note = 2'-O-methyladenosine-3'-phosphate
  modified_base 16: mod_base = OTHER; note = 2'-deoxy-2'-fluoroguanosine-3'-phosphate
  modified_base 17: mod_base = OTHER; note = 2'-O-methyladenosine-3'-phosphate
  modified_base 18: mod_base = OTHER; note = 2'-O-methylguanosine-3'-phosphate
  modified_base 19: mod_base = OTHER; note = 2'-O-methyladenosine-3'-phosphate
  modified_base 20: mod_base = OTHER; note = 2'-O-methyladenosine-3'-phosphate
  modified_base 21: mod_base = OTHER; note = 2'-O-methylguanosine-3'-phosphorothioate
  modified_base 22: mod_base = OTHER; note = 2'-O-methylcytidine-3'-phosphorothioate
  modified_base 23: mod_base = OTHER; note = 2'-O-methyladenosine
aaaactggtggcccagagaagca

SEQ ID NO: 1188 - RNA, 23 nt, synthetic construct
  source 1..23: mol_type = other RNA
  modified_base 1: mod_base = OTHER; note = 2'-O-methyladenosine-3'-phosphorothioate
  modified_base 2: mod_base = OTHER; note = 2'-deoxy-2'-fluoroguanosine-3'-phosphorothioate
  modified_base 3: mod_base = OTHER; note = 2'-O-methylguanosine-3'-phosphate
  modified_base 4: mod_base = OTHER; note = 2'-O-methylguanosine-3'-phosphate
  modified_base 5: mod_base = OTHER; note = 2'-O-methyluridine-3'-phosphate
  modified_base 6: mod_base = OTHER; note = 2'-deoxy-2'-fluoroguanosine-3'-phosphate
  modified_base 7: mod_base = OTHER; note = 2'-O-methyladenosine-3'-phosphate
  modified_base 8: mod_base = OTHER; note = 2'-deoxy-2'-fluoroadenosine-3'-phosphate
  modified_base 9: mod_base = OTHER; note = 2'-deoxy-2'-fluoroadenosine-3'-phosphate
  modified_base 10: mod_base = OTHER; note = 2'-O-methylcytidine-3'-phosphate
  modified_base 11: mod_base = OTHER; note = 2'-O-methyluridine-3'-phosphate
  modified_base 12: mod_base = OTHER; note = 2'-O-methylguanosine-3'-phosphate
  modified_base 13: mod_base = OTHER; note = 2'-O-methylguanosine-3'-phosphate
  modified_base 14: mod_base = OTHER; note = 2'-deoxy-2'-fluorouridine-3'-phosphate
  modified_base 15: mod_base = OTHER; note = 2'-O-methylguanosine-3'-phosphate
  modified_base 16: mod_base = OTHER; note = 2'-deoxy-2'-fluoroguanosine-3'-phosphate
  modified_base 17: mod_base = OTHER; note = 2'-O-methylcytidine-3'-phosphate
  modified_base 18: mod_base = OTHER; note = 2'-O-methylcytidine-3'-phosphate
  modified_base 19: mod_base = OTHER; note = 2'-O-methylcytidine-3'-phosphate
  modified_base 20: mod_base = OTHER; note = 2'-O-methyladenosine-3'-phosphate
  modified_base 21: mod_base = OTHER; note = 2'-O-methylguanosine-3'-phosphorothioate
  modified_base 22: mod_base = OTHER; note = 2'-O-methyladenosine-3'-phosphorothioate
  modified_base 23: mod_base = OTHER; note = 2'-O-methylguanosine
agggtgaaactggtggcccagag

SEQ ID NO: 1189 - RNA, 23 nt, synthetic construct
  source 1..23: mol_type = other RNA
  modified_base 1: mod_base = OTHER; note = 2'-O-methyladenosine-3'-phosphorothioate
  modified_base 2: mod_base = OTHER; note = 2'-deoxy-2'-fluorouridine-3'-phosphorothioate
  modified_base 3: mod_base = OTHER; note = 2'-O-methylguanosine-3'-phosphate
  modified_base 4: mod_base = OTHER; note = 2'-O-methylguanosine-3'-phosphate
  modified_base 5: mod_base = OTHER; note = 2'-O-methylcytidine-3'-phosphate
  modified_base 6: mod_base = OTHER; note = 2'-deoxy-2'-fluoroadenosine-3'-phosphate
  modified_base 7: mod_base = OTHER; note = 2'-O-methyladenosine-3'-phosphate
  modified_base 8: mod_base = OTHER; note = 2'-deoxy-2'-fluoroguanosine-3'-phosphate
  modified_base 9: mod_base = OTHER; note = 2'-deoxy-2'-fluoroguanosine-3'-phosphate
  modified_base 10: mod_base = OTHER; note = 2'-O-methylguanosine-3'-phosphate
  modified_base 11: mod_base = OTHER; note = 2'-O-methyluridine-3'-phosphate
  modified_base 12: mod_base = OTHER; note = 2'-O-methylguanosine-3'-phosphate
  modified_base 13: mod_base = OTHER; note = 2'-O-methyladenosine-3'-phosphate
  modified_base 14: mod_base = OTHER; note = 2'-deoxy-2'-fluoroadenosine-3'-phosphate
  modified_base 15: mod_base = OTHER; note = 2'-O-methyladenosine-3'-phosphate
  modified_base 16: mod_base = OTHER; note = 2'-deoxy-2'-fluorocytidine-3'-phosphate
  modified_base 17: mod_base = OTHER; note = 2'-O-methyluridine-3'-phosphate
  modified_base 18: mod_base = OTHER; note = 2'-O-methylguanosine-3'-phosphate
  modified_base 19: mod_base = OTHER; note = 2'-O-methylguanosine-3'-phosphate
  modified_base 20: mod_base = OTHER; note = 2'-O-methyluridine-3'-phosphate
  modified_base 21: mod_base = OTHER; note = 2'-O-methylguanosine-3'-phosphorothioate
  modified_base 22: mod_base = OTHER; note = 2'-O-methylguanosine-3'-phosphorothioate
  modified_base 23: mod_base = OTHER; note = 2'-O-methylcytidine
atggcaagggtgaaactggtggc

SEQ ID NO: 1190 - RNA, 23 nt, synthetic construct
  source 1..23: mol_type = other RNA
  modified_base 1: mod_base = OTHER; note = 2'-O-methyladenosine-3'-phosphorothioate
  modified_base 2: mod_base = OTHER; note = 2'-deoxy-2'-fluoroadenosine-3'-phosphorothioate
  modified_base 3: mod_base = OTHER; note = 2'-O-methylguanosine-3'-phosphate
  modified_base 4: mod_base = OTHER; note = 2'-O-methylcytidine-3'-phosphate
  modified_base 5: mod_base = OTHER; note = 2'-O-methylcytidine-3'-phosphate
  modified_base 6: mod_base = OTHER; note = 2'-deoxy-2'-fluoroadenosine-3'-phosphate
  modified_base 7: mod_base = OTHER; note = 2'-O-methyladenosine-3'-phosphate
  modified_base 8: mod_base = OTHER; note = 2'-deoxy-2'-fluoroguanosine-3'-phosphate
  modified_base 9: mod_base = OTHER; note = 2'-deoxy-2'-fluoroguanosine-3'-phosphate
  modified_base 10: mod_base = OTHER; note = 2'-O-methyluridine-3'-phosphate
  modified_base 11: mod_base = OTHER; note = 2'-O-methylguanosine-3'-phosphate
  modified_base 12: mod_base = OTHER; note = 2'-O-methylguanosine-3'-phosphate
  modified_base 13: mod_base = OTHER; note = 2'-O-methylcytidine-3'-phosphate
  modified_base 14: mod_base = OTHER; note = 2'-deoxy-2'-fluoroadenosine-3'-phosphate
  modified_base 15: mod_base = OTHER; note = 2'-O-methyladenosine-3'-phosphate
  modified_base 16: mod_base = OTHER; note = 2'-deoxy-2'-fluoroguanosine-3'-phosphate
  modified_base 17: mod_base = OTHER; note = 2'-O-methylguanosine-3'-phosphate
  modified_base 18: mod_base = OTHER; note = 2'-O-methylguanosine-3'-phosphate
  modified_base 19: mod_base = OTHER; note = 2'-O-methyluridine-3'-phosphate
  modified_base 20: mod_base = OTHER; note = 2'-O-methylguanosine-3'-phosphate
  modified_base 21: mod_base = OTHER; note = 2'-O-methyladenosine-3'-phosphorothioate
  modified_base 22: mod_base = OTHER; note = 2'-O-methyladenosine-3'-phosphorothioate
  modified_base 23: mod_base = OTHER; note = 2'-O-methyladenosine
aagccaaggtggcaagggtgaaa

SEQ ID NO: 1191 - RNA, 23 nt, synthetic construct
  source 1..23: mol_type = other RNA
  modified_base 1: mod_base = OTHER; note = 2'-O-methyladenosine-3'-phosphorothioate
  modified_base 2: mod_base = OTHER; note = 2'-deoxy-2'-fluorouridine-3'-phosphorothioate
  modified_base 3: mod_base = OTHER; note = 2'-O-methyluridine-3'-phosphate
  modified_base 4: mod_base = OTHER; note = 2'-O-methylcytidine-3'-phosphate
  modified_base 5: mod_base = OTHER; note = 2'-O-methyladenosine-3'-phosphate
  modified_base 6: mod_base = OTHER; note = 2'-deoxy-2'-fluoroadenosine-3'-phosphate
  modified_base 7: mod_base = OTHER; note = 2'-O-methylguanosine-3'-phosphate
  modified_base 8: mod_base = OTHER; note = 2'-deoxy-2'-fluoroguanosine-3'-phosphate
  modified_base 9: mod_base = OTHER; note = 2'-deoxy-2'-fluorouridine-3'-phosphate
  modified_base 10: mod_base = OTHER; note = 2'-O-methyladenosine-3'-phosphate
  modified_base 11: mod_base = OTHER; note = 2'-O-methylguanosine-3'-phosphate
  modified_base 12: mod_base = OTHER; note = 2'-O-methylcytidine-3'-phosphate
  modified_base 13: mod_base = OTHER; note = 2'-O-methylcytidine-3'-phosphate
  modified_base 14: mod_base = OTHER; note = 2'-deoxy-2'-fluoroadenosine-3'-phosphate
  modified_base 15: mod_base = OTHER; note = 2'-O-methyladenosine-3'-phosphate
  modified_base 16: mod_base = OTHER; note = 2'-deoxy-2'-fluoroguanosine-3'-phosphate
  modified_base 17: mod_base = OTHER; note = 2'-O-methylguanosine-3'-phosphate
  modified_base 18: mod_base = OTHER; note = 2'-O-methyluridine-3'-phosphate
  modified_base 19: mod_base = OTHER; note = 2'-O-methylguanosine-3'-phosphate
  modified_base 20: mod_base = OTHER; note = 2'-O-methylguanosine-3'-phosphate
  modified_base 21: mod_base = OTHER; note = 2'-O-methylcytidine-3'-phosphorothioate
  modified_base 22: mod_base = OTHER; note = 2'-O-methyladenosine-3'-phosphorothioate
  modified_base 23: mod_base = OTHER; note = 2'-O-methyladenosine
attcaaggtagccaaggtggcaa

SEQ ID NO: 1192 - RNA, 23 nt, synthetic construct
  source 1..23: mol_type = other RNA
  modified_base 1: mod_base = OTHER; note = 2'-O-methyladenosine-3'-phosphorothioate
  modified_base 2: mod_base = OTHER; note = 2'-deoxy-2'-fluorouridine-3'-phosphorothioate
  modified_base 3: mod_base = OTHER; note = 2'-O-methylguanosine-3'-phosphate
  modified_base 4: mod_base = OTHER; note = 2'-O-methylguanosine-3'-phosphate
  modified_base 5: mod_base = OTHER; note = 2'-O-methyluridine-3'-phosphate
  modified_base 6: mod_base = OTHER; note = 2'-deoxy-2'-fluorouridine-3'-phosphate
  modified_base 7: mod_base = OTHER; note = 2'-O-methyluridine-3'-phosphate
  modified_base 8: mod_base = OTHER; note = 2'-deoxy-2'-fluorouridine-3'-phosphate
  modified_base 9: mod_base = OTHER; note = 2'-deoxy-2'-fluorocytidine-3'-phosphate
  modified_base 10: mod_base = OTHER; note = 2'-O-methyladenosine-3'-phosphate
  modified_base 11: mod_base = OTHER; note = 2'-O-methyladenosine-3'-phosphate
  modified_base 12: mod_base = OTHER; note = 2'-O-methylguanosine-3'-phosphate
  modified_base 13: mod_base = OTHER; note = 2'-O-methylguanosine-3'-phosphate
  modified_base 14: mod_base = OTHER; note = 2'-deoxy-2'-fluorouridine-3'-phosphate
  modified_base 15: mod_base = OTHER; note = 2'-O-methyladenosine-3'-phosphate
  modified_base 16: mod_base = OTHER; note = 2'-deoxy-2'-fluoroguanosine-3'-phosphate
  modified_base 17: mod_base = OTHER; note = 2'-O-methylcytidine-3'-phosphate
  modified_base 18: mod_base = OTHER; note = 2'-O-methylcytidine-3'-phosphate
  modified_base 19: mod_base = OTHER; note = 2'-O-methyladenosine-3'-phosphate
  modified_base 20: mod_base = OTHER; note = 2'-O-methyladenosine-3'-phosphate
  modified_base 21: mod_base = OTHER; note = 2'-O-methylguanosine-3'-phosphorothioate
  modified_base 22: mod_base = OTHER; note = 2'-O-methylguanosine-3'-phosphorothioate
  modified_base 23: mod_base = OTHER; note = 2'-O-methyluridine
atggttttcaaggtagccaaggt

SEQ ID NO: 1193 - RNA, 23 nt, synthetic construct
  source 1..23: mol_type = other RNA
  modified_base 1: mod_base = OTHER; note = 2'-O-methyladenosine-3'-phosphorothioate
  modified_base 2: mod_base = OTHER; note = 2'-deoxy-2'-fluoroadenosine-3'-phosphorothioate
  modified_base 3: mod_base = OTHER; note = 2'-O-methylcytidine-3'-phosphate
  modified_base 4: mod_base = OTHER; note = 2'-O-methyluridine-3'-phosphate
  modified_base 5: mod_base = OTHER; note = 2'-O-methyluridine-3'-phosphate
  modified_base 6: mod_base = OTHER; note = 2'-deoxy-2'-fluoroguanosine-3'-phosphate
  modified_base 7: mod_base = OTHER; note = 2'-O-methylcytidine-3'-phosphate
  modified_base 8: mod_base = OTHER; note = 2'-deoxy-2'-fluorouridine-3'-phosphate
  modified_base 9: mod_base = OTHER; note = 2'-deoxy-2'-fluoroguanosine-3'-phosphate
  modified_base 10: mod_base = OTHER; note = 2'-O-methylguanosine-3'-phosphate
  modified_base 11: mod_base = OTHER; note = 2'-O-methyluridine-3'-phosphate
  modified_base 12: mod_base = OTHER; note = 2'-O-methyluridine-3'-phosphate
  modified_base 13: mod_base = OTHER; note = 2'-O-methyluridine-3'-phosphate
  modified_base 14: mod_base = OTHER; note = 2'-deoxy-2'-fluorouridine-3'-phosphate
  modified_base 15: mod_base = OTHER; note = 2'-O-methylcytidine-3'-phosphate
  modified_base 16: mod_base = OTHER; note = 2'-deoxy-2'-fluoroadenosine-3'-phosphate
  modified_base 17: mod_base = OTHER; note = 2'-O-methyladenosine-3'-phosphate
  modified_base 18: mod_base = OTHER; note = 2'-O-methylguanosine-3'-phosphate
  modified_base 19: mod_base = OTHER; note = 2'-O-methylguanosine-3'-phosphate
  modified_base 20: mod_base = OTHER; note = 2'-O-methyluridine-3'-phosphate
  modified_base 21: mod_base = OTHER; note = 2'-O-methyladenosine-3'-phosphorothioate
  modified_base 22: mod_base = OTHER; note = 2'-O-methylguanosine-3'-phosphorothioate
  modified_base 23: mod_base = OTHER; note = 2'-O-methylcytidine
aacttgctggttttcaaggtagc

SEQ ID NO: 1194 - RNA, 23 nt, synthetic construct
  source 1..23: mol_type = other RNA
  modified_base 1: mod_base = OTHER; note = 2'-O-methyladenosine-3'-phosphorothioate
  modified_base 2: mod_base = OTHER; note = 2'-deoxy-2'-fluoroadenosine-3'-phosphorothioate
  modified_base 3: mod_base = OTHER; note = 2'-O-methylguanosine-3'-phosphate
  modified_base 4: mod_base = OTHER; note = 2'-O-methyladenosine-3'-phosphate
  modified_base 5: mod_base = OTHER; note = 2'-O-methylguanosine-3'-phosphate
  modified_base 6: mod_base = OTHER; note = 2'-deoxy-2'-fluoroguanosine-3'-phosphate
  modified_base 7: mod_base = OTHER; note = 2'-O-methyluridine-3'-phosphate
  modified_base 8: mod_base = OTHER; note = 2'-deoxy-2'-fluoroguanosine-3'-phosphate
  modified_base 9: mod_base = OTHER; note = 2'-deoxy-2'-fluoroguanosine-3'-phosphate
  modified_base 10: mod_base = OTHER; note = 2'-O-methylguanosine-3'-phosphate
  modified_base 11: mod_base = OTHER; note = 2'-O-methyladenosine-3'-phosphate
  modified_base 12: mod_base = OTHER; note = 2'-O-methylcytidine-3'-phosphate
  modified_base 13: mod_base = OTHER; note = 2'-O-methyluridine-3'-phosphate
  modified_base 14: mod_base = OTHER; note = 2'-deoxy-2'-fluorouridine-3'-phosphate
  modified_base 15: mod_base = OTHER; note = 2'-O-methylguanosine-3'-phosphate
  modified_base 16: mod_base = OTHER; note = 2'-deoxy-2'-fluorocytidine-3'-phosphate
  modified_base 17: mod_base = OTHER; note = 2'-O-methyluridine-3'-phosphate
  modified_base 18: mod_base = OTHER; note = 2'-O-methylguanosine-3'-phosphate
  modified_base 19: mod_base = OTHER; note = 2'-O-methylguanosine-3'-phosphate
  modified_base 20: mod_base = OTHER; note = 2'-O-methyluridine-3'-phosphate
  modified_base 21: mod_base = OTHER; note = 2'-O-methyluridine-3'-phosphorothioate
  modified_base 22: mod_base = OTHER; note = 2'-O-methyluridine-3'-phosphorothioate
  modified_base 23: mod_base = OTHER; note = 2'-O-methyluridine
aagaggtgggacttgctggtttt

SEQ ID NO: 1195 - RNA, 23 nt, synthetic construct
  source 1..23: mol_type = other RNA
  modified_base 1: mod_base = OTHER; note = 2'-O-methyladenosine-3'-phosphorothioate
  modified_base 2: mod_base = OTHER; note = 2'-deoxy-2'-fluoroguanosine-3'-phosphorothioate
  modified_base 3: mod_base = OTHER; note = 2'-O-methylguanosine-3'-phosphate
  modified_base 4: mod_base = OTHER; note = 2'-O-methyladenosine-3'-phosphate
  modified_base 5: mod_base = OTHER; note = 2'-O-methyladenosine-3'-phosphate
  modified_base 6: mod_base = OTHER; note = 2'-deoxy-2'-fluoroguanosine-3'-phosphate
  modified_base 7: mod_base = OTHER; note = 2'-O-methyladenosine-3'-phosphate
  modified_base 8: mod_base = OTHER; note = 2'-deoxy-2'-fluorocytidine-3'-phosphate
  modified_base 9: mod_base = OTHER; note = 2'-deoxy-2'-fluoroadenosine-3'-phosphate
  modified_base 10: mod_base = OTHER; note = 2'-O-methylguanosine-3'-phosphate
  modified_base 11: mod_base = OTHER; note = 2'-O-methyladenosine-3'-phosphate
  modified_base 12: mod_base = OTHER; note = 2'-O-methylguanosine-3'-phosphate
  modified_base 13: mod_base = OTHER; note = 2'-O-methylguanosine-3'-phosphate
  modified_base 14: mod_base = OTHER; note = 2'-deoxy-2'-fluorouridine-3'-phosphate
  modified_base 15: mod_base = OTHER; note = 2'-O-methylguanosine-3'-phosphate
  modified_base 16: mod_base = OTHER; note = 2'-deoxy-2'-fluoroguanosine-3'-phosphate
  modified_base 17: mod_base = OTHER; note = 2'-O-methylguanosine-3'-phosphate
  modified_base 18: mod_base = OTHER; note = 2'-O-methyladenosine-3'-phosphate
  modified_base 19: mod_base = OTHER; note = 2'-O-methylcytidine-3'-phosphate
  modified_base 20: mod_base = OTHER; note = 2'-O-methyluridine-3'-phosphate
  modified_base 21: mod_base = OTHER; note = 2'-O-methyluridine-3'-phosphorothioate
  modified_base 22: mod_base = OTHER; note = 2'-O-methylguanosine-3'-phosphorothioate
  modified_base 23: mod_base = OTHER; note = 2'-O-methylcytidine
aggaagacagaggtgggacttgc

SEQ ID NO: 1196 - RNA, 23 nt, synthetic construct
  source 1..23: mol_type = other RNA
  modified_base 1: mod_base = OTHER; note = 2'-O-methyladenosine-3'-phosphorothioate
  modified_base 2: mod_base = OTHER; note = 2'-deoxy-2'-fluoroguanosine-3'-phosphorothioate
  modified_base 3: mod_base = OTHER; note = 2'-O-methyladenosine-3'-phosphate
  modified_base 4: mod_base = OTHER; note = 2'-O-methylcytidine-3'-phosphate
  modified_base 5: mod_base = OTHER; note = 2'-O-methyladenosine-3'-phosphate
  modified_base 6: mod_base = OTHER; note = 2'-deoxy-2'-fluorouridine-3'-phosphate
  modified_base 7: mod_base = OTHER; note = 2'-O-methylguanosine-3'-phosphate
  modified_base 8: mod_base = OTHER; note = 2'-deoxy-2'-fluoroguanosine-3'-phosphate
  modified_base 9: mod_base = OTHER; note = 2'-deoxy-2'-fluoroguanosine-3'-phosphate
  modified_base 10: mod_base = OTHER; note = 2'-O-methyladenosine-3'-phosphate
  modified_base 11: mod_base = OTHER; note = 2'-O-methyladenosine-3'-phosphate
  modified_base 12: mod_base = OTHER; note = 2'-O-methylguanosine-3'-phosphate
  modified_base 13: mod_base = OTHER; note = 2'-O-methyladenosine-3'-phosphate
  modified_base 14: mod_base = OTHER; note = 2'-deoxy-2'-fluorocytidine-3'-phosphate
  modified_base 15: mod_base = OTHER; note = 2'-O-methyladenosine-3'-phosphate
  modified_base 16: mod_base = OTHER; note = 2'-deoxy-2'-fluoroguanosine-3'-phosphate
  modified_base 17: mod_base = OTHER; note = 2'-O-methyladenosine-3'-phosphate
  modified_base 18: mod_base = OTHER; note = 2'-O-methylguanosine-3'-phosphate
  modified_base 19: mod_base = OTHER; note = 2'-O-methylguanosine-3'-phosphate
  modified_base 20: mod_base = OTHER; note = 2'-O-methyluridine-3'-phosphate
  modified_base 21: mod_base = OTHER; note = 2'-O-methylguanosine-3'-phosphorothioate
  modified_base 22: mod_base = OTHER; note = 2'-O-methylguanosine-3'-phosphorothioate
  modified_base 23: mod_base = OTHER; note = 2'-O-methylguanosine
agacatgggaagacagaggtggg

SEQ ID NO: 1197 - RNA, 23 nt, synthetic construct
  source 1..23: mol_type = other RNA
  modified_base 1: mod_base = OTHER; note = 2'-O-methyladenosine-3'-phosphorothioate
  modified_base 2: mod_base = OTHER; note = 2'-deoxy-2'-fluoroguanosine-3'-phosphorothioate
  modified_base 3: mod_base = OTHER; note = 2'-O-methyladenosine-3'-phosphate
  modified_base 4: mod_base = OTHER; note = 2'-O-methylcytidine-3'-phosphate
  modified_base 5: mod_base = OTHER; note = 2'-O-methyluridine-3'-phosphate
  modified_base 6: mod_base = OTHER; note = 2'-deoxy-2'-fluoroguanosine-3'-phosphate
  modified_base 7: mod_base = OTHER; note = 2'-O-methylguanosine-3'-phosphate
  modified_base 8: mod_base = OTHER; note = 2'-deoxy-2'-fluoroadenosine-3'-phosphate
  modified_base 9: mod_base = OTHER; note = 2'-deoxy-2'-fluorocytidine-3'-phosphate
  modified_base 10: mod_base = OTHER; note = 2'-O-methyladenosine-3'-phosphate
  modified_base 11: mod_base = OTHER; note = 2'-O-methyluridine-3'-phosphate
  modified_base 12: mod_base = OTHER; note = 2'-O-methylguanosine-3'-phosphate
  modified_base 13: mod_base = OTHER; note = 2'-O-methylguanosine-3'-phosphate
  modified_base 14: mod_base = OTHER; note = 2'-deoxy-2'-fluoroguanosine-3'-phosphate
  modified_base 15: mod_base = OTHER; note = 2'-O-methyladenosine-3'-phosphate
  modified_base 16: mod_base = OTHER; note = 2'-deoxy-2'-fluoroadenosine-3'-phosphate
  modified_base 17: mod_base = OTHER; note = 2'-O-methylguanosine-3'-phosphate
  modified_base 18: mod_base = OTHER; note = 2'-O-methyladenosine-3'-phosphate
  modified_base 19: mod_base = OTHER; note = 2'-O-methylcytidine-3'-phosphate
  modified_base 20: mod_base = OTHER; note = 2'-O-methyladenosine-3'-phosphate
  modified_base 21: mod_base = OTHER; note = 2'-O-methylguanosine-3'-phosphorothioate
  modified_base 22: mod_base = OTHER; note = 2'-O-methyladenosine-3'-phosphorothioate
  modified_base 23: mod_base = OTHER; note = 2'-O-methylguanosine
agactggacatgggaagacagag

SEQ ID NO: 1198 - RNA, 23 nt, synthetic construct
  source 1..23: mol_type = other RNA
  modified_base 1: mod_base = OTHER; note = 2'-O-methyladenosine-3'-phosphorothioate
  modified_base 2: mod_base = OTHER; note = 2'-deoxy-2'-fluoroadenosine-3'-phosphorothioate
  modified_base 3: mod_base = OTHER; note = 2'-O-methyladenosine-3'-phosphate
  modified_base 4: mod_base = OTHER; note = 2'-O-methyluridine-3'-phosphate
  modified_base 5: mod_base = OTHER; note = 2'-O-methylcytidine-3'-phosphate
  modified_base 6: mod_base = OTHER; note = 2'-deoxy-2'-fluoroadenosine-3'-phosphate
  modified_base 7: mod_base = OTHER; note = 2'-O-methylguanosine-3'-phosphate
  modified_base 8: mod_base = OTHER; note = 2'-deoxy-2'-fluoroadenosine-3'-phosphate
  modified_base 9: mod_base = OTHER; note = 2'-deoxy-2'-fluorocytidine-3'-phosphate
  modified_base 10: mod_base = OTHER; note = 2'-O-methyluridine-3'-phosphate
  modified_base 11: mod_base = OTHER; note = 2'-O-methylguanosine-3'-phosphate
  modified_base 12: mod_base = OTHER; note = 2'-O-methylguanosine-3'-phosphate
  modified_base 13: mod_base = OTHER; note = 2'-O-methyladenosine-3'-phosphate
  modified_base 14: mod_base = OTHER; note = 2'-deoxy-2'-fluorocytidine-3'-phosphate
  modified_base 15: mod_base = OTHER; note = 2'-O-methyladenosine-3'-phosphate
  modified_base 16: mod_base = OTHER; note = 2'-deoxy-2'-fluorouridine-3'-phosphate
  modified_base 17: mod_base = OTHER; note = 2'-O-methylguanosine-3'-phosphate
  modified_base 18: mod_base = OTHER; note = 2'-O-methylguanosine-3'-phosphate
  modified_base 19: mod_base = OTHER; note = 2'-O-methylguanosine-3'-phosphate
  modified_base 20: mod_base = OTHER; note = 2'-O-methyladenosine-3'-phosphate
  modified_base 21: mod_base = OTHER; note = 2'-O-methyladenosine-3'-phosphorothioate
  modified_base 22: mod_base = OTHER; note = 2'-O-methylguanosine-3'-phosphorothioate
  modified_base 23: mod_base = OTHER; note = 2'-O-methyladenosine
aaatcagactggacatgggaaga

SEQ ID NO: 1199 - RNA, 23 nt, synthetic construct
  source 1..23: mol_type = other RNA
  modified_base 1: mod_base = OTHER; note = 2'-O-methyladenosine-3'-phosphorothioate
  modified_base 2: mod_base = OTHER; note = 2'-deoxy-2'-fluorouridine-3'-phosphorothioate
  modified_base 3: mod_base = OTHER; note = 2'-O-methyluridine-3'-phosphate
  modified_base 4: mod_base = OTHER; note = 2'-O-methyluridine-3'-phosphate
  modified_base 5: mod_base = OTHER; note = 2'-O-methyluridine-3'-phosphate
  modified_base 6: mod_base = OTHER; note = 2'-deoxy-2'-fluorocytidine-3'-phosphate
  modified_base 7: mod_base = OTHER; note = 2'-O-methylcytidine-3'-phosphate
  modified_base 8: mod_base = OTHER; note = 2'-deoxy-2'-fluoroadenosine-3'-phosphate
  modified_base 9: mod_base = OTHER; note = 2'-deoxy-2'-fluoroguanosine-3'-phosphate
  modified_base 10: mod_base = OTHER; note = 2'-O-methylcytidine-3'-phosphate
  modified_base 11: mod_base = OTHER; note = 2'-O-methyladenosine-3'-phosphate
  modified_base 12: mod_base = OTHER; note = 2'-O-methyladenosine-3'-phosphate
  modified_base 13: mod_base = OTHER; note = 2'-O-methyluridine-3'-phosphate
  modified_base 14: mod_base = OTHER; note = 2'-deoxy-2'-fluorocytidine-3'-phosphate
  modified_base 15: mod_base = OTHER; note = 2'-O-methyladenosine-3'-phosphate
  modified_base 16: mod_base = OTHER; note = 2'-deoxy-2'-fluoroguanosine-3'-phosphate
  modified_base 17: mod_base = OTHER; note = 2'-O-methyladenosine-3'-phosphate
  modified_base 18: mod_base = OTHER; note = 2'-O-methylcytidine-3'-phosphate
  modified_base 19: mod_base = OTHER; note = 2'-O-methyluridine-3'-phosphate
  modified_base 20: mod_base = OTHER; note = 2'-O-methylguanosine-3'-phosphate
  modified_base 21: mod_base = OTHER; note = 2'-O-methylguanosine-3'-phosphorothioate
  modified_base 22: mod_base = OTHER; note = 2'-O-methyladenosine-3'-phosphorothioate
  modified_base 23: mod_base = OTHER; note = 2'-O-methylcytidine
attttccagcaatcagactggac

SEQ ID NO: 1200 - RNA, 23 nt, synthetic construct
  source 1..23: mol_type = other RNA
  modified_base 1: mod_base = OTHER; note = 2'-O-methyladenosine-3'-phosphorothioate
  modified_base 2: mod_base = OTHER; note = 2'-deoxy-2'-fluorouridine-3'-phosphorothioate
  modified_base 3: mod_base = OTHER; note = 2'-O-methyluridine-3'-phosphate
  modified_base 4: mod_base = OTHER; note = 2'-O-methyluridine-3'-phosphate
  modified_base 5: mod_base = OTHER; note = 2'-O-methylcytidine-3'-phosphate
  modified_base 6: mod_base = OTHER; note = 2'-deoxy-2'-fluorocytidine-3'-phosphate
  modified_base 7: mod_base = OTHER; note = 2'-O-methylcytidine-3'-phosphate
  modified_base 8: mod_base = OTHER; note = 2'-deoxy-2'-fluorouridine-3'-phosphate
  modified_base 9: mod_base = OTHER; note = 2'-deoxy-2'-fluorouridine-3'-phosphate
  modified_base 10: mod_base = OTHER; note = 2'-O-methyluridine-3'-phosphate
  modified_base 11: mod_base = OTHER; note = 2'-O-methyluridine-3'-phosphate
  modified_base 12: mod_base = OTHER; note = 2'-O-methylcytidine-3'-phosphate
  modified_base 13: mod_base = OTHER; note = 2'-O-methylcytidine-3'-phosphate
  modified_base 14: mod_base = OTHER; note = 2'-deoxy-2'-fluoroadenosine-3'-phosphate
  modified_base 15: mod_base = OTHER; note = 2'-O-methylguanosine-3'-phosphate
  modified_base 16: mod_base = OTHER; note = 2'-deoxy-2'-fluorocytidine-3'-phosphate
  modified_base 17: mod_base = OTHER; note = 2'-O-methyladenosine-3'-phosphate
  modified_base 18: mod_base = OTHER; note = 2'-O-methyladenosine-3'-phosphate
  modified_base 19: mod_base = OTHER; note = 2'-O-methyluridine-3'-phosphate
  modified_base 20: mod_base = OTHER; note = 2'-O-methylcytidine-3'-phosphate
  modified_base 21: mod_base = OTHER; note = 2'-O-methyladenosine-3'-phosphorothioate
  modified_base 22: mod_base = OTHER; note = 2'-O-methylguanosine-3'-phosphorothioate
  modified_base 23: mod_base = OTHER; note = 2'-O-methyladenosine
atttcccttttccagcaatcaga

SEQ ID NO: 1201 - RNA, 23 nt, synthetic construct
  source 1..23: mol_type = other RNA
  modified_base 1: mod_base = OTHER; note = 2'-O-methyladenosine-3'-phosphorothioate
  modified_base 2: mod_base = OTHER; note = 2'-deoxy-2'-fluoroadenosine-3'-phosphorothioate
  modified_base 3: mod_base = OTHER; note = 2'-O-methyladenosine-3'-phosphate
  modified_base 4: mod_base = OTHER; note = 2'-O-methyluridine-3'-phosphate
  modified_base 5: mod_base = OTHER; note = 2'-O-methylguanosine-3'-phosphate
  modified_base 6: mod_base = OTHER; note = 2'-deoxy-2'-fluoroguanosine-3'-phosphate
  modified_base 7: mod_base = OTHER; note = 2'-O-methylcytidine-3'-phosphate
  modified_base 8: mod_base = OTHER; note = 2'-deoxy-2'-fluorouridine-3'-phosphate
  modified_base 9: mod_base = OTHER; note = 2'-deoxy-2'-fluorouridine-3'-phosphate
  modified_base 10: mod_base = OTHER; note = 2'-O-methyluridine-3'-phosphate
  modified_base 11: mod_base = OTHER; note = 2'-O-methylcytidine-3'-phosphate
  modified_base 12: mod_base = OTHER; note = 2'-O-methylcytidine-3'-phosphate
  modified_base 13: mod_base = OTHER; note = 2'-O-methylcytidine-3'-phosphate
  modified_base 14: mod_base = OTHER; note = 2'-deoxy-2'-fluorouridine-3'-phosphate
  modified_base 15: mod_base = OTHER; note = 2'-O-methyluridine-3'-phosphate
  modified_base 16: mod_base = OTHER; note = 2'-deoxy-2'-fluorouridine-3'-phosphate
  modified_base 17: mod_base = OTHER; note = 2'-O-methyluridine-3'-phosphate
  modified_base 18: mod_base = OTHER; note = 2'-O-methylcytidine-3'-phosphate
  modified_base 19: mod_base = OTHER; note = 2'-O-methylcytidine-3'-phosphate
  modified_base 20: mod_base = OTHER; note = 2'-O-methyladenosine-3'-phosphate
  modified_base 21: mod_base = OTHER; note = 2'-O-methylguanosine-3'-phosphorothioate
  modified_base 22: mod_base = OTHER; note = 2'-O-methylcytidine-3'-phosphorothioate
  modified_base 23: mod_base = OTHER; note = 2'-O-methyladenosine
aaatggctttcccttttccagca

SEQ ID NO: 1202 - RNA, 23 nt, synthetic construct
  source 1..23: mol_type = other RNA
  modified_base 1: mod_base = OTHER; note = 2'-O-methyladenosine-3'-phosphorothioate
  modified_base 2: mod_base = OTHER; note = 2'-deoxy-2'-fluoroadenosine-3'-phosphorothioate
  modified_base 3: mod_base = OTHER; note = 2'-O-methylguanosine-3'-phosphate
  modified_base 4: mod_base = OTHER; note = 2'-O-methyladenosine-3'-phosphate
  modified_base 5: mod_base = OTHER; note = 2'-O-methylcytidine-3'-phosphate
  modified_base 6: mod_base = OTHER; note = 2'-deoxy-2'-fluoroadenosine-3'-phosphate
  modified_base 7: mod_base = OTHER; note = 2'-O-methyladenosine-3'-phosphate
  modified_base 8: mod_base = OTHER; note = 2'-deoxy-2'-fluoroadenosine-3'-phosphate
  modified_base 9: mod_base = OTHER; note = 2'-deoxy-2'-fluoroadenosine-3'-phosphate
  modified_base 10: mod_base = OTHER; note = 2'-O-methyluridine-3'-phosphate
  modified_base 11: mod_base = OTHER; note = 2'-O-methylguanosine-3'-phosphate
  modified_base 12: mod_base = OTHER; note = 2'-O-methylguanosine-3'-phosphate
  modified_base 13: mod_base = OTHER; note = 2'-O-methylcytidine-3'-phosphate
  modified_base 14: mod_base = OTHER; note = 2'-deoxy-2'-fluorouridine-3'-phosphate
  modified_base 15: mod_base = OTHER; note = 2'-O-methyluridine-3'-phosphate
  modified_base 16: mod_base = OTHER; note = 2'-deoxy-2'-fluorouridine-3'-phosphate
  modified_base 17: mod_base = OTHER; note = 2'-O-methylcytidine-3'-phosphate
  modified_base 18: mod_base = OTHER; note = 2'-O-methylcytidine-3'-phosphate
  modified_base 19: mod_base = OTHER; note = 2'-O-methylcytidine-3'-phosphate
  modified_base 20: mod_base = OTHER; note = 2'-O-methyluridine-3'-phosphate
  modified_base 21: mod_base = OTHER; note = 2'-O-methyluridine-3'-phosphorothioate
  modified_base 22: mod_base = OTHER; note = 2'-O-methyluridine-3'-phosphorothioate
  modified_base 23: mod_base = OTHER; note = 2'-O-methyluridine
aagacaaaatggctttccctttt

SEQ ID NO: 1203 - RNA, 23 nt, synthetic construct
  source 1..23: mol_type = other RNA
  modified_base 1: mod_base = OTHER; note = 2'-O-methyladenosine-3'-phosphorothioate
  modified_base 2: mod_base = OTHER; note = 2'-deoxy-2'-fluorocytidine-3'-phosphorothioate
  modified_base 3: mod_base = OTHER; note = 2'-O-methyladenosine-3'-phosphate
  modified_base 4: mod_base = OTHER; note = 2'-O-methyluridine-3'-phosphate
  modified_base 5: mod_base = OTHER; note = 2'-O-methyladenosine-3'-phosphate
  modified_base 6: mod_base = OTHER; note = 2'-deoxy-2'-fluoroguanosine-3'-phosphate
  modified_base 7: mod_base = OTHER; note = 2'-O-methyladenosine-3'-phosphate
  modified_base 8: mod_base = OTHER; note = 2'-deoxy-2'-fluoroguanosine-3'-phosphate
  modified_base 9: mod_base = OTHER; note = 2'-deoxy-2'-fluoroadenosine-3'-phosphate
  modified_base 10: mod_base = OTHER; note = 2'-O-methylguanosine-3'-phosphate
  modified_base 11: mod_base = OTHER; note = 2'-O-methyladenosine-3'-phosphate
  modified_base 12: mod_base = OTHER; note = 2'-O-methylcytidine-3'-phosphate
  modified_base 13: mod_base = OTHER; note = 2'-O-methyladenosine-3'-phosphate
  modified_base 14: mod_base = OTHER; note = 2'-deoxy-2'-fluoroadenosine-3'-phosphate
  modified_base 15: mod_base = OTHER; note = 2'-O-methyladenosine-3'-phosphate
  modified_base 16: mod_base = OTHER; note = 2'-deoxy-2'-fluoroadenosine-3'-phosphate
  modified_base 17: mod_base = OTHER; note = 2'-O-methyluridine-3'-phosphate
  modified_base 18: mod_base = OTHER; note = 2'-O-methylguanosine-3'-phosphate
  modified_base 19: mod_base = OTHER; note = 2'-O-methylguanosine-3'-phosphate
  modified_base 20: mod_base = OTHER; note = 2'-O-methylcytidine-3'-phosphate
  modified_base 21: mod_base = OTHER; note = 2'-O-methyluridine-3'-phosphorothioate
  modified_base 22: mod_base = OTHER; note = 2'-O-methyluridine-3'-phosphorothioate
  modified_base 23: mod_base = OTHER; note = 2'-O-methyluridine
acatagagagacaaaatggcttt

SEQ ID NO: 1204 - RNA, 23 nt, synthetic construct
  source 1..23: mol_type = other RNA
  modified_base 1: mod_base = OTHER; note = 2'-O-methyladenosine-3'-phosphorothioate
  modified_base 2: mod_base = OTHER; note = 2'-deoxy-2'-fluoroguanosine-3'-phosphorothioate
  modified_base 3: mod_base = OTHER; note = 2'-O-methyladenosine-3'-phosphate
  modified_base 4: mod_base = OTHER; note = 2'-O-methylcytidine-3'-phosphate
  modified_base 5: mod_base = OTHER; note = 2'-O-methylcytidine-3'-phosphate
  modified_base 6: mod_base = OTHER; note = 2'-deoxy-2'-fluoroadenosine-3'-phosphate
  modified_base 7: mod_base = OTHER; note = 2'-O-methylcytidine-3'-phosphate
  modified_base 8: mod_base = OTHER; note = 2'-deoxy-2'-fluoroadenosine-3'-phosphate
  modified_base 9: mod_base = OTHER; note = 2'-deoxy-2'-fluorouridine-3'-phosphate
  modified_base 10: mod_base = OTHER; note = 2'-O-methyladenosine-3'-phosphate
  modified_base 11: mod_base = OTHER; note = 2'-O-methylguanosine-3'-phosphate
  modified_base 12: mod_base = OTHER; note = 2'-O-methyladenosine-3'-phosphate
  modified_base 13: mod_base = OTHER; note = 2'-O-methylguanosine-3'-phosphate
  modified_base 14: mod_base = OTHER; note = 2'-deoxy-2'-fluoroadenosine-3'-phosphate
  modified_base 15: mod_base = OTHER; note = 2'-O-methylguanosine-3'-phosphate
  modified_base 16: mod_base = OTHER; note = 2'-deoxy-2'-fluoroadenosine-3'-phosphate
  modified_base 17: mod_base = OTHER; note = 2'-O-methylcytidine-3'-phosphate
  modified_base 18: mod_base = OTHER; note = 2'-O-methyladenosine-3'-phosphate
  modified_base 19: mod_base = OTHER; note = 2'-O-methyladenosine-3'-phosphate
  modified_base 20: mod_base = OTHER; note = 2'-O-methyladenosine-3'-phosphate
  modified_base 21: mod_base = OTHER; note = 2'-O-methyladenosine-3'-phosphorothioate
  modified_base 22: mod_base = OTHER; note = 2'-O-methyluridine-3'-phosphorothioate
  modified_base 23: mod_base = OTHER; note = 2'-O-methylguanosine
agaccacatagagagacaaaatg

SEQ ID NO: 1205 - RNA, 23 nt, synthetic construct
  source 1..23: mol_type = other RNA
  modified_base 1: mod_base = OTHER; note = 2'-O-methyladenosine-3'-phosphorothioate
  modified_base 2: mod_base = OTHER; note = 2'-deoxy-2'-fluoroadenosine-3'-phosphorothioate
  modified_base 3: mod_base = OTHER; note = 2'-O-methyladenosine-3'-phosphate
  modified_base 4: mod_base = OTHER; note = 2'-O-methylguanosine-3'-phosphate
  modified_base 5: mod_base = OTHER; note = 2'-O-methyluridine-3'-phosphate
  modified_base 6: mod_base = OTHER; note = 2'-deoxy-2'-fluorocytidine-3'-phosphate
  modified_base 7: mod_base = OTHER; note = 2'-O-methylguanosine-3'-phosphate
  modified_base 8: mod_base = OTHER; note = 2'-deoxy-2'-fluoroadenosine-3'-phosphate
  modified_base 9: mod_base = OTHER; note = 2'-deoxy-2'-fluorocytidine-3'-phosphate
  modified_base 10: mod_base = OTHER; note = 2'-O-methylcytidine-3'-phosphate
  modified_base 11: mod_base = OTHER; note = 2'-O-methyladenosine-3'-phosphate
  modified_base 12: mod_base = OTHER; note = 2'-O-methylcytidine-3'-phosphate
  modified_base 13: mod_base = OTHER; note = 2'-O-methyladenosine-3'-phosphate
  modified_base 14: mod_base = OTHER; note = 2'-deoxy-2'-fluorouridine-3'-phosphate
  modified_base 15: mod_base = OTHER; note = 2'-O-methyladenosine-3'-phosphate
  modified_base 16: mod_base = OTHER; note = 2'-deoxy-2'-fluoroguanosine-3'-phosphate
  modified_base 17: mod_base = OTHER; note = 2'-O-methyladenosine-3'-phosphate
  modified_base 18: mod_base = OTHER; note = 2'-O-methylguanosine-3'-phosphate
  modified_base 19: mod_base = OTHER; note = 2'-O-methyladenosine-3'-phosphate
  modified_base 20: mod_base = OTHER; note = 2'-O-methylguanosine-3'-phosphate
  modified_base 21: mod_base = OTHER; note = 2'-O-methyladenosine-3'-phosphorothioate
  modified_base 22: mod_base = OTHER; note = 2'-O-methylcytidine-3'-phosphorothioate
  modified_base 23: mod_base = OTHER; note = 2'-O-methyladenosine
aaagtcgaccacatagagagaca

SEQ ID NO: 1206 - RNA, 23 nt, synthetic construct
  source 1..23: mol_type = other RNA
  modified_base 1: mod_base = OTHER; note = 2'-O-methyladenosine-3'-phosphorothioate
  modified_base 2: mod_base = OTHER; note = 2'-deoxy-2'-fluoroadenosine-3'-phosphorothioate
  modified_base 3: mod_base = OTHER; note = 2'-O-methylguanosine-3'-phosphate
  modified_base 4: mod_base = OTHER; note = 2'-O-methyladenosine-3'-phosphate
  modified_base 5: mod_base = OTHER; note = 2'-O-methyladenosine-3'-phosphate
  modified_base 6: mod_base = OTHER; note = 2'-deoxy-2'-fluoroguanosine-3'-phosphate
  modified_base 7: mod_base = OTHER; note = 2'-O-methylguanosine-3'-phosphate
  modified_base 8: mod_base = OTHER; note = 2'-deoxy-2'-fluorouridine-3'-phosphate
  modified_base 9: mod_base = OTHER; note = 2'-deoxy-2'-fluoroguanosine-3'-phosphate
  modified_base 10: mod_base = OTHER; note = 2'-O-methyladenosine-3'-phosphate
  modified_base 11: mod_base = OTHER; note = 2'-O-methyladenosine-3'-phosphate
  modified_base 12: mod_base = OTHER; note = 2'-O-methylguanosine-3'-phosphate
  modified_base 13: mod_base = OTHER; note = 2'-O-methyluridine-3'-phosphate
  modified_base 14: mod_base = OTHER; note = 2'-deoxy-2'-fluorocytidine-3'-phosphate
  modified_base 15: mod_base = OTHER; note = 2'-O-methylguanosine-3'-phosphate
  modified_base 16: mod_base = OTHER; note = 2'-deoxy-2'-fluoroadenosine-3'-phosphate
  modified_base 17: mod_base = OTHER; note = 2'-O-methylcytidine-3'-phosphate
  modified_base 18: mod_base = OTHER; note = 2'-O-methylcytidine-3'-phosphate
  modified_base 19: mod_base = OTHER; note = 2'-O-methyladenosine-3'-phosphate
  modified_base 20: mod_base = OTHER; note = 2'-O-methylcytidine-3'-phosphate
  modified_base 21: mod_base = OTHER; note = 2'-O-methyladenosine-3'-phosphorothioate
  modified_base 22: mod_base = OTHER; note = 2'-O-methyluridine-3'-phosphorothioate
  modified_base 23: mod_base = OTHER; note = 2'-O-methyladenosine
aagaaggtgaagtcgaccacata

SEQ ID NO: 1207 - RNA, 23 nt, synthetic construct
  source 1..23: mol_type = other RNA
  modified_base 1: mod_base = OTHER; note = 2'-O-methyladenosine-3'-phosphorothioate
  modified_base 2: mod_base = OTHER; note = 2'-deoxy-2'-fluorocytidine-3'-phosphorothioate
  modified_base 3: mod_base = OTHER; note = 2'-O-methyladenosine-3'-phosphate
  modified_base 4: mod_base = OTHER; note = 2'-O-methyladenosine-3'-phosphate
  modified_base 5: mod_base = OTHER; note = 2'-O-methylcytidine-3'-phosphate
  modified_base 6: mod_base = OTHER; note = 2'-deoxy-2'-fluoroadenosine-3'-phosphate
  modified_base 7: mod_base = OTHER; note = 2'-O-methylcytidine-3'-phosphate
  modified_base 8: mod_base = OTHER; note = 2'-deoxy-2'-fluoroadenosine-3'-phosphate
  modified_base 9: mod_base = OTHER; note = 2'-deoxy-2'-fluoroguanosine-3'-phosphate
  modified_base 10: mod_base = OTHER; note = 2'-O-methyladenosine-3'-phosphate
  modified_base 11: mod_base = OTHER; note = 2'-O-methyladenosine-3'-phosphate
  modified_base 12: mod_base = OTHER; note = 2'-O-methylguanosine-3'-phosphate
  modified_base 13: mod_base = OTHER; note = 2'-O-methylguanosine-3'-phosphate
  modified_base 14: mod_base = OTHER; note = 2'-deoxy-2'-fluorouridine-3'-phosphate
  modified_base 15: mod_base = OTHER; note = 2'-O-methylguanosine-3'-phosphate
  modified_base 16: mod_base = OTHER; note = 2'-deoxy-2'-fluoroadenosine-3'-phosphate
  modified_base 17: mod_base = OTHER; note = 2'-O-methyladenosine-3'-phosphate
  modified_base 18: mod_base = OTHER; note = 2'-O-methylguanosine-3'-phosphate
  modified_base 19: mod_base = OTHER; note = 2'-O-methyluridine-3'-phosphate
  modified_base 20: mod_base = OTHER; note = 2'-O-methylcytidine-3'-phosphate
  modified_base 21: mod_base = OTHER; note = 2'-O-methylguanosine-3'-phosphorothioate
  modified_base 22: mod_base = OTHER; note = 2'-O-methyladenosine-3'-phosphorothioate
  modified_base 23: mod_base = OTHER; note = 2'-O-methylcytidine
acaacacagaaggtgaagtcgac

SEQ ID NO: 1208 - RNA, 23 nt, synthetic construct
  source 1..23: mol_type = other RNA
  modified_base 1: mod_base = OTHER; note = 2'-O-methyladenosine-3'-phosphorothioate
  modified_base 2: mod_base = OTHER; note = 2'-deoxy-2'-fluoroadenosine-3'-phosphorothioate
  modified_base 3: mod_base = OTHER; note = 2'-O-methylcytidine-3'-phosphate
  modified_base 4: mod_base = OTHER; note = 2'-O-methylcytidine-3'-phosphate
  modified_base 5: mod_base = OTHER; note = 2'-O-methyladenosine-3'-phosphate
  modified_base 6: mod_base = OTHER; note = 2'-deoxy-2'-fluorocytidine-3'-phosphate
  modified_base 7: mod_base = OTHER; note = 2'-O-methyladenosine-3'-phosphate
  modified_base 8: mod_base = OTHER; note = 2'-deoxy-2'-fluoroguanosine-3'-phosphate
  modified_base 9: mod_base = OTHER; note = 2'-deoxy-2'-fluorocytidine-3'-phosphate
  modified_base 10: mod_base = OTHER; note = 2'-O-methyladenosine-3'-phosphate
  modified_base 11: mod_base = OTHER; note = 2'-O-methyladenosine-3'-phosphate
  modified_base 12: mod_base = OTHER; note = 2'-O-methylcytidine-3'-phosphate
  modified_base 13: mod_base = OTHER; note = 2'-O-methyladenosine-3'-phosphate
  modified_base 14: mod_base = OTHER; note = 2'-deoxy-2'-fluorocytidine-3'-phosphate
  modified_base 15: mod_base = OTHER; note = 2'-O-methyladenosine-3'-phosphate
  modified_base 16: mod_base = OTHER; note = 2'-deoxy-2'-fluoroguanosine-3'-phosphate
  modified_base 17: mod_base = OTHER; note = 2'-O-methyladenosine-3'-phosphate
  modified_base 18: mod_base = OTHER; note = 2'-O-methyladenosine-3'-phosphate
  modified_base 19: mod_base = OTHER; note = 2'-O-methylguanosine-3'-phosphate
  modified_base 20: mod_base = OTHER; note = 2'-O-methylguanosine-3'-phosphate
  modified_base 21: mod_base = OTHER; note = 2'-O-methyluridine-3'-phosphorothioate
  modified_base 22: mod_base = OTHER; note = 2'-O-methylguanosine-3'-phosphorothioate
  modified_base 23: mod_base = OTHER; note = 2'-O-methyladenosine
aaccacagcaacacagaaggtga

SEQ ID NO: 1209 - RNA, 23 nt, synthetic construct
  source 1..23: mol_type = other RNA
  modified_base 1: mod_base = OTHER; note = 2'-O-methyladenosine-3'-phosphorothioate
  modified_base 2: mod_base = OTHER; note = 2'-deoxy-2'-fluoroadenosine-3'-phosphorothioate
  modified_base 3: mod_base = OTHER; note = 2'-O-methylguanosine-3'-phosphate
  modified_base 4: mod_base = OTHER; note = 2'-O-methyladenosine-3'-phosphate
  modified_base 5: mod_base = OTHER; note = 2'-O-methylcytidine-3'-phosphate
  modified_base 6: mod_base = OTHER; note = 2'-deoxy-2'-fluoroadenosine-3'-phosphate
  modified_base 7: mod_base = OTHER; note = 2'-O-methylguanosine-3'-phosphate
  modified_base 8: mod_base = OTHER; note = 2'-deoxy-2'-fluoroadenosine-3'-phosphate
  modified_base 9: mod_base = OTHER; note = 2'-deoxy-2'-fluoroguanosine-3'-phosphate
  modified_base 10: mod_base = OTHER; note = 2'-O-methyladenosine-3'-phosphate
  modified_base 11: mod_base = OTHER; note = 2'-O-methylcytidine-3'-phosphate
  modified_base 12: mod_base = OTHER; note = 2'-O-methylcytidine-3'-phosphate
  modified_base 13: mod_base = OTHER; note = 2'-O-methyladenosine-3'-phosphate
  modified_base 14: mod_base = OTHER; note = 2'-deoxy-2'-fluorocytidine-3'-phosphate
  modified_base 15: mod_base = OTHER; note = 2'-O-methyladenosine-3'-phosphate
  modified_base 16: mod_base = OTHER; note = 2'-deoxy-2'-fluoroguanosine-3'-phosphate
  modified_base 17: mod_base = OTHER; note = 2'-O-methylcytidine-3'-phosphate
  modified_base 18: mod_base = OTHER; note = 2'-O-methyladenosine-3'-phosphate
  modified_base 19: mod_base = OTHER; note = 2'-O-methyladenosine-3'-phosphate
  modified_base 20: mod_base = OTHER; note = 2'-O-methylcytidine-3'-phosphate
  modified_base 21: mod_base = OTHER; note = 2'-O-methyladenosine-3'-phosphorothioate
  modified_base 22: mod_base = OTHER; note = 2'-O-methylcytidine-3'-phosphorothioate
  modified_base 23: mod_base = OTHER; note = 2'-O-methyladenosine
aagacagagaccacagcaacaca

SEQ ID NO: 1210 - RNA, 23 nt, synthetic construct
  source 1..23: mol_type = other RNA
  modified_base 1: mod_base = OTHER; note = 2'-O-methyladenosine-3'-phosphorothioate
  modified_base 2: mod_base = OTHER; note = 2'-deoxy-2'-fluorouridine-3'-phosphorothioate
  modified_base 3: mod_base = OTHER; note = 2'-O-methylguanosine-3'-phosphate
  modified_base 4: mod_base = OTHER; note = 2'-O-methyluridine-3'-phosphate
  modified_base 5: mod_base = OTHER; note = 2'-O-methyladenosine-3'-phosphate
  modified_base 6: mod_base = OTHER; note = 2'-deoxy-2'-fluoroadenosine-3'-phosphate
  modified_base 7: mod_base = OTHER; note = 2'-O-methylguanosine-3'-phosphate
  modified_base 8: mod_base = OTHER; note = 2'-deoxy-2'-fluoroadenosine-3'-phosphate
  modified_base 9: mod_base = OTHER; note = 2'-deoxy-2'-fluoroguanosine-3'-phosphate
  modified_base 10: mod_base = OTHER; note = 2'-O-methyladenosine-3'-phosphate
  modified_base 11: mod_base = OTHER; note = 2'-O-methylcytidine-3'-phosphate
  modified_base 12: mod_base = OTHER; note = 2'-O-methyladenosine-3'-phosphate
  modified_base 13: mod_base = OTHER; note = 2'-O-methylguanosine-3'-phosphate
  modified_base 14: mod_base = OTHER; note = 2'-deoxy-2'-fluoroadenosine-3'-phosphate
  modified_base 15: mod_base = OTHER; note = 2'-O-methylguanosine-3'-phosphate
  modified_base 16: mod_base = OTHER; note = 2'-deoxy-2'-fluoroadenosine-3'-phosphate
  modified_base 17: mod_base = OTHER; note = 2'-O-methylcytidine-3'-phosphate
  modified_base 18: mod_base = OTHER; note = 2'-O-methylcytidine-3'-phosphate
  modified_base 19: mod_base = OTHER; note = 2'-O-methyladenosine-3'-phosphate
  modified_base 20: mod_base = OTHER; note = 2'-O-methylcytidine-3'-phosphate
  modified_base 21: mod_base = OTHER; note = 2'-O-methyladenosine-3'-phosphorothioate
  modified_base 22: mod_base = OTHER; note = 2'-O-methylguanosine-3'-phosphorothioate
  modified_base 23: mod_base = OTHER; note = 2'-O-methylcytidine
atgtaagagacagagaccacagc

SEQ ID NO: 1211 - RNA, 23 nt, synthetic construct
  source 1..23: mol_type = other RNA
  modified_base 1: mod_base = OTHER; note = 2'-O-methyladenosine-3'-phosphorothioate
  modified_base 2: mod_base = OTHER; note = 2'-deoxy-2'-fluorocytidine-3'-phosphorothioate
  modified_base 3: mod_base = OTHER; note = 2'-O-methyladenosine-3'-phosphate
  modified_base 4: mod_base = OTHER; note = 2'-O-methyluridine-3'-phosphate
  modified_base 5: mod_base = OTHER; note = 2'-O-methylguanosine-3'-phosphate
  modified_base 6: mod_base = OTHER; note = 2'-deoxy-2'-fluoroadenosine-3'-phosphate
  modified_base 7: mod_base = OTHER; note = 2'-O-methyluridine-3'-phosphate
  modified_base 8: mod_base = OTHER; note = 2'-deoxy-2'-fluoroguanosine-3'-phosphate
  modified_base 9: mod_base = OTHER; note = 2'-deoxy-2'-fluorouridine-3'-phosphate
  modified_base 10: mod_base = OTHER; note = 2'-O-methyladenosine-3'-phosphate
  modified_base 11: mod_base = OTHER; note = 2'-O-methyladenosine-3'-phosphate
  modified_base 12: mod_base = OTHER; note = 2'-O-methylguanosine-3'-phosphate
  modified_base 13: mod_base = OTHER; note = 2'-O-methyladenosine-3'-phosphate
  modified_base 14: mod_base = OTHER; note = 2'-deoxy-2'-fluoroguanosine-3'-phosphate
  modified_base 15: mod_base = OTHER; note = 2'-O-methyladenosine-3'-phosphate
  modified_base 16: mod_base = OTHER; note = 2'-deoxy-2'-fluorocytidine-3'-phosphate
  modified_base 17: mod_base = OTHER; note = 2'-O-methyladenosine-3'-phosphate
  modified_base 18: mod_base = OTHER; note = 2'-O-methylguanosine-3'-phosphate
  modified_base 19: mod_base = OTHER; note = 2'-O-methyladenosine-3'-phosphate
  modified_base 20: mod_base = OTHER; note = 2'-O-methylguanosine-3'-phosphate
  modified_base 21: mod_base = OTHER; note = 2'-O-methyladenosine-3'-phosphorothioate
  modified_base 22: mod_base = OTHER; note = 2'-O-methylcytidine-3'-phosphorothioate
  modified_base 23: mod_base = OTHER; note = 2'-O-methylcytidine
acatgatgtaagagacagagacc

SEQ ID NO: 1212 - RNA, 23 nt, synthetic construct
  source 1..23: mol_type = other RNA
  modified_base 1: mod_base = OTHER; note = 2'-O-methyladenosine-3'-phosphorothioate
  modified_base 2: mod_base = OTHER; note = 2'-deoxy-2'-fluorouridine-3'-phosphorothioate
  modified_base 3: mod_base = OTHER; note = 2'-O-methylguanosine-3'-phosphate
  modified_base 4: mod_base = OTHER; note = 2'-O-methyladenosine-3'-phosphate
  modified_base 5: mod_base = OTHER; note = 2'-O-methylguanosine-3'-phosphate
  modified_base 6: mod_base = OTHER; note = 2'-deoxy-2'-fluorocytidine-3'-phosphate
  modified_base 7: mod_base = OTHER; note = 2'-O-methyladenosine-3'-phosphate
  modified_base 8: mod_base = OTHER; note = 2'-deoxy-2'-fluoroadenosine-3'-phosphate
  modified_base 9: mod_base = OTHER; note = 2'-deoxy-2'-fluorouridine-3'-phosphate
  modified_base 10: mod_base = OTHER; note = 2'-O-methylcytidine-3'-phosphate
  modified_base 11: mod_base = OTHER; note = 2'-O-methyladenosine-3'-phosphate
  modified_base 12: mod_base = OTHER; note = 2'-O-methyluridine-3'-phosphate
  modified_base 13: mod_base = OTHER; note = 2'-O-methylguanosine-3'-phosphate
  modified_base 14: mod_base = OTHER; note = 2'-deoxy-2'-fluoroadenosine-3'-phosphate
  modified_base 15: mod_base = OTHER; note = 2'-O-methyluridine-3'-phosphate
  modified_base 16: mod_base = OTHER; note = 2'-deoxy-2'-fluoroguanosine-3'-phosphate
  modified_base 17: mod_base = OTHER; note = 2'-O-methyluridine-3'-phosphate
  modified_base 18: mod_base = OTHER; note = 2'-O-methyladenosine-3'-phosphate
  modified_base 19: mod_base = OTHER; note = 2'-O-methyladenosine-3'-phosphate
  modified_base 20: mod_base = OTHER; note = 2'-O-methylguanosine-3'-phosphate
  modified_base 21: mod_base = OTHER; note = 2'-O-methyladenosine-3'-phosphorothioate
  modified_base 22: mod_base = OTHER; note = 2'-O-methylguanosine-3'-phosphorothioate
  modified_base 23: mod_base = OTHER; note = 2'-O-methyladenosine
atgagcaatcatgatgtaagaga

SEQ ID NO: 1213 - RNA, 23 nt, synthetic construct
  source 1..23: mol_type = other RNA
  modified_base 1: mod_base = OTHER; note = 2'-O-methyladenosine-3'-phosphorothioate
  modified_base 2: mod_base = OTHER; note = 2'-deoxy-2'-fluoroadenosine-3'-phosphorothioate
  modified_base 3: mod_base = OTHER; note = 2'-O-methylguanosine-3'-phosphate
  modified_base 4: mod_base = OTHER; note = 2'-O-methylguanosine-3'-phosphate
  modified_base 5: mod_base = OTHER; note = 2'-O-methylguanosine-3'-phosphate
  modified_base 6: mod_base = OTHER; note = 2'-deoxy-2'-fluorouridine-3'-phosphate
  modified_base 7: mod_base = OTHER; note = 2'-O-methylcytidine-3'-phosphate
  modified_base 8: mod_base = OTHER; note = 2'-deoxy-2'-fluorouridine-3'-phosphate
  modified_base 9: mod_base = OTHER; note = 2'-deoxy-2'-fluoroguanosine-3'-phosphate
  modified_base 10: mod_base = OTHER; note = 2'-O-methyladenosine-3'-phosphate
  modified_base 11: mod_base = OTHER; note = 2'-O-methylguanosine-3'-phosphate
  modified_base 12: mod_base = OTHER; note = 2'-O-methylcytidine-3'-phosphate
  modified_base 13: mod_base = OTHER; note = 2'-O-methyladenosine-3'-phosphate
  modified_base 14: mod_base = OTHER; note = 2'-deoxy-2'-fluoroadenosine-3'-phosphate
  modified_base 15: mod_base = OTHER; note = 2'-O-methyluridine-3'-phosphate
  modified_base 16: mod_base = OTHER; note = 2'-deoxy-2'-fluorocytidine-3'-phosphate
  modified_base 17: mod_base = OTHER; note = 2'-O-methyladenosine-3'-phosphate
  modified_base 18: mod_base = OTHER; note = 2'-O-methyluridine-3'-phosphate
  modified_base 19: mod_base = OTHER; note = 2'-O-methylguanosine-3'-phosphate
  modified_base 20: mod_base = OTHER; note = 2'-O-methyladenosine-3'-phosphate
  modified_base 21: mod_base = OTHER; note = 2'-O-methyluridine-3'-phosphorothioate
  modified_base 22: mod_base = OTHER; note = 2'-O-methylguanosine-3'-phosphorothioate
  modified_base 23: mod_base = OTHER; note = 2'-O-methyluridine
aagggtctgagcaatcatgatgt

SEQ ID NO: 1214 - RNA, 23 nt, synthetic construct
  source 1..23: mol_type = other RNA
  modified_base 1: mod_base = OTHER; note = 2'-O-methyladenosine-3'-phosphorothioate
  modified_base 2: mod_base = OTHER; note = 2'-deoxy-2'-fluoroadenosine-3'-phosphorothioate
  modified_base 3: mod_base = OTHER; note = 2'-O-methylguanosine-3'-phosphate
  modified_base 4: mod_base = OTHER; note = 2'-O-methylcytidine-3'-phosphate
  modified_base 5: mod_base = OTHER; note = 2'-O-methylguanosine-3'-phosphate
  modified_base 6: mod_base = OTHER; note = 2'-deoxy-2'-fluorouridine-3'-phosphate
  modified_base 7: mod_base = OTHER; note = 2'-O-methyluridine-3'-phosphate
  modified_base 8: mod_base = OTHER; note = 2'-deoxy-2'-fluorocytidine-3'-phosphate
  modified_base 9: mod_base = OTHER; note = 2'-deoxy-2'-fluorouridine-3'-phosphate
  modified_base 10: mod_base = OTHER; note = 2'-O-methyluridine-3'-phosphate
  modified_base 11: mod_base = OTHER; note = 2'-O-methylcytidine-3'-phosphate
  modified_base 12: mod_base = OTHER; note = 2'-O-methylcytidine-3'-phosphate
  modified_base 13: mod_base = OTHER; note = 2'-O-methylguanosine-3'-phosphate
  modified_base 14: mod_base = OTHER; note = 2'-deoxy-2'-fluorocytidine-3'-phosphate
  modified_base 15: mod_base = OTHER; note = 2'-O-methyladenosine-3'-phosphate
  modified_base 16: mod_base = OTHER; note = 2'-deoxy-2'-fluoroguanosine-3'-phosphate
  modified_base 17: mod_base = OTHER; note = 2'-O-methylguanosine-3'-phosphate
  modified_base 18: mod_base = OTHER; note = 2'-O-methylguanosine-3'-phosphate
  modified_base 19: mod_base = OTHER; note = 2'-O-methyluridine-3'-phosphate
  modified_base 20: mod_base = OTHER; note = 2'-O-methylcytidine-3'-phosphate
  modified_base 21: mod_base = OTHER; note = 2'-O-methyluridine-3'-phosphorothioate
  modified_base 22: mod_base = OTHER; note = 2'-O-methylguanosine-3'-phosphorothioate
  modified_base 23: mod_base = OTHER; note = 2'-O-methyladenosine
aagcgttcttccgcagggtctga

SEQ ID NO: 1215 - RNA, 23 nt, synthetic construct
  source 1..23: mol_type = other RNA
  modified_base 1: mod_base = OTHER; note = 2'-O-methyladenosine-3'-phosphorothioate
  modified_base 2: mod_base = OTHER; note = 2'-deoxy-2'-fluoroguanosine-3'-phosphorothioate
  modified_base 3: mod_base = OTHER; note = 2'-O-methyladenosine-3'-phosphate
  modified_base 4: mod_base = OTHER; note = 2'-O-methylcytidine-3'-phosphate
  modified_base 5: mod_base = OTHER; note = 2'-O-methyluridine-3'-phosphate
  modified_base 6: mod_base = OTHER; note = 2'-deoxy-2'-fluorouridine-3'-phosphate
  modified_base 7: mod_base = OTHER; note = 2'-O-methylguanosine-3'-phosphate
  modified_base 8: mod_base = OTHER; note = 2'-deoxy-2'-fluoroadenosine-3'-phosphate
  modified_base 9: mod_base = OTHER; note = 2'-deoxy-2'-fluoroguanosine-3'-phosphate
  modified_base 10: mod_base = OTHER; note = 2'-O-methylcytidine-3'-phosphate
  modified_base 11: mod_base = OTHER; note = 2'-O-methylguanosine-3'-phosphate
  modified_base 12: mod_base = OTHER; note = 2'-O-methyluridine-3'-phosphate
  modified_base 13: mod_base = OTHER; note = 2'-O-methyluridine-3'-phosphate
  modified_base 14: mod_base = OTHER; note = 2'-deoxy-2'-fluorocytidine-3'-phosphate
  modified_base 15: mod_base = OTHER; note = 2'-O-methyluridine-3'-phosphate
  modified_base 16: mod_base = OTHER; note = 2'-deoxy-2'-fluorouridine-3'-phosphate
  modified_base 17: mod_base = OTHER; note = 2'-O-methylcytidine-3'-phosphate
  modified_base 18: mod_base = OTHER; note = 2'-O-methylcytidine-3'-phosphate
  modified_base 19: mod_base = OTHER; note = 2'-O-methylguanosine-3'-phosphate
  modified_base 20: mod_base = OTHER; note = 2'-O-methylcytidine-3'-phosphate
  modified_base 21: mod_base = OTHER; note = 2'-O-methyladenosine-3'-phosphorothioate
  modified_base 22: mod_base = OTHER; note = 2'-O-methylguanosine-3'-phosphorothioate
  modified_base 23: mod_base = OTHER; note = 2'-O-methylguanosine
agacttgagcgttcttccgcagg

SEQ ID NO: 1216 - RNA, 23 nt, synthetic construct
  source 1..23: mol_type = other RNA
  modified_base 1: mod_base = OTHER; note = 2'-O-methyladenosine-3'-phosphorothioate
  modified_base 2: mod_base = OTHER; note = 2'-deoxy-2'-fluorouridine-3'-phosphorothioate
  modified_base 3: mod_base = OTHER; note = 2'-O-methyluridine-3'-phosphate
  modified_base 4: mod_base = OTHER; note = 2'-O-methyluridine-3'-phosphate
  modified_base 5: mod_base = OTHER; note = 2'-O-methylcytidine-3'-phosphate
  modified_base 6: mod_base = OTHER; note = 2'-deoxy-2'-fluorouridine-3'-phosphate
  modified_base 7: mod_base = OTHER; note = 2'-O-methylguanosine-3'-phosphate
  modified_base 8: mod_base = OTHER; note = 2'-deoxy-2'-fluoroadenosine-3'-phosphate
  modified_base 9: mod_base = OTHER; note = 2'-deoxy-2'-fluorocytidine-3'-phosphate
  modified_base 10: mod_base = OTHER; note = 2'-O-methyluridine-3'-phosphate
  modified_base 11: mod_base = OTHER; note = 2'-O-methyluridine-3'-phosphate
  modified_base 12: mod_base = OTHER; note = 2'-O-methylguanosine-3'-phosphate
  modified_base 13: mod_base = OTHER; note = 2'-O-methyladenosine-3'-phosphate
  modified_base 14: mod_base = OTHER; note = 2'-deoxy-2'-fluoroguanosine-3'-phosphate
  modified_base 15: mod_base = OTHER; note = 2'-O-methylcytidine-3'-phosphate
  modified_base 16: mod_base = OTHER; note = 2'-deoxy-2'-fluoroguanosine-3'-phosphate
  modified_base 17: mod_base = OTHER; note = 2'-O-methyluridine-3'-phosphate
  modified_base 18: mod_base = OTHER; note = 2'-O-methyluridine-3'-phosphate
  modified_base 19: mod_base = OTHER; note = 2'-O-methylcytidine-3'-phosphate
  modified_base 20: mod_base = OTHER; note = 2'-O-methyluridine-3'-phosphate
  modified_base 21: mod_base = OTHER; note = 2'-O-methyluridine-3'-phosphorothioate
  modified_base 22: mod_base = OTHER; note = 2'-O-methylcytidine-3'-phosphorothioate
  modified_base 23: mod_base = OTHER; note = 2'-O-methylcytidine
atttctgacttgagcgttcttcc

SEQ ID NO: 1217 - RNA, 23 nt, synthetic construct
  source 1..23: mol_type = other RNA
  modified_base 1: mod_base = OTHER; note = 2'-O-methyladenosine-3'-phosphorothioate
  modified_base 2: mod_base = OTHER; note = 2'-deoxy-2'-fluoroguanosine-3'-phosphorothioate
  modified_base 3: mod_base = OTHER; note = 2'-O-methylguanosine-3'-phosphate
  modified_base 4: mod_base = OTHER; note = 2'-O-methylcytidine-3'-phosphate
  modified_base 5: mod_base = OTHER; note = 2'-O-methyladenosine-3'-phosphate
  modified_base 6: mod_base = OTHER; note = 2'-deoxy-2'-fluorocytidine-3'-phosphate
  modified_base 7: mod_base = OTHER; note = 2'-O-methyluridine-3'-phosphate
  modified_base 8: mod_base = OTHER; note = 2'-deoxy-2'-fluorouridine-3'-phosphate
  modified_base 9: mod_base = OTHER; note = 2'-deoxy-2'-fluorouridine-3'-phosphate
  modified_base 10: mod_base = OTHER; note = 2'-O-methylcytidine-3'-phosphate
  modified_base 11: mod_base = OTHER; note = 2'-O-methyluridine-3'-phosphate
  modified_base 12: mod_base = OTHER; note = 2'-O-methylguanosine-3'-phosphate
  modified_base 13: mod_base = OTHER; note = 2'-O-methyladenosine-3'-phosphate
  modified_base 14: mod_base = OTHER; note = 2'-deoxy-2'-fluorocytidine-3'-phosphate
  modified_base 15: mod_base = OTHER; note = 2'-O-methyluridine-3'-phosphate
  modified_base 16: mod_base = OTHER; note = 2'-deoxy-2'-fluorouridine-3'-phosphate
  modified_base 17: mod_base = OTHER; note = 2'-O-methylguanosine-3'-phosphate
  modified_base 18: mod_base = OTHER; note = 2'-O-methyladenosine-3'-phosphate
  modified_base 19: mod_base = OTHER; note = 2'-O-methylguanosine-3'-phosphate
  modified_base 20: mod_base = OTHER; note = 2'-O-methylcytidine-3'-phosphate
  modified_base 21: mod_base = OTHER; note = 2'-O-methylguanosine-3'-phosphorothioate
  modified_base 22: mod_base = OTHER; note = 2'-O-methyluridine-3'-phosphorothioate
  modified_base 23: mod_base = OTHER; note = 2'-O-methyluridine
aggcactttctgacttgagcgtt

SEQ ID NO: 1218 - RNA, 23 nt, synthetic construct
  source 1..23: mol_type = other RNA
  modified_base 1: mod_base = OTHER; note = 2'-O-methyladenosine-3'-phosphorothioate
  modified_base 2: mod_base = OTHER; note = 2'-deoxy-2'-fluoroguanosine-3'-phosphorothioate
  modified_base 3: mod_base = OTHER; note = 2'-O-methyladenosine-3'-phosphate
  modified_base 4: mod_base = OTHER; note = 2'-O-methyladenosine-3'-phosphate
  modified_base 5: mod_base = OTHER; note = 2'-O-methylguanosine-3'-phosphate
  modified_base 6: mod_base = OTHER; note = 2'-deoxy-2'-fluorocytidine-3'-phosphate
  modified_base 7: mod_base = OTHER; note = 2'-O-methyladenosine-3'-phosphate
  modified_base 8: mod_base = OTHER; note = 2'-deoxy-2'-fluorouridine-3'-phosphate
  modified_base 9: mod_base = OTHER; note = 2'-deoxy-2'-fluorocytidine-3'-phosphate
  modified_base 10: mod_base = OTHER; note = 2'-O-methylguanosine-3'-phosphate
  modified_base 11: mod_base = OTHER; note = 2'-O-methyladenosine-3'-phosphate
  modified_base 12: mod_base = OTHER; note = 2'-O-methylcytidine-3'-phosphate
  modified_base 13: mod_base = OTHER; note = 2'-O-methyluridine-3'-phosphate
  modified_base 14: mod_base = OTHER; note = 2'-deoxy-2'-fluoroguanosine-3'-phosphate
  modified_base 15: mod_base = OTHER; note = 2'-O-methyluridine-3'-phosphate
  modified_base 16: mod_base = OTHER; note = 2'-deoxy-2'-fluoroguanosine-3'-phosphate
  modified_base 17: mod_base = OTHER; note = 2'-O-methyladenosine-3'-phosphate
  modified_base 18: mod_base = OTHER; note = 2'-O-methyluridine-3'-phosphate
  modified_base 19: mod_base = OTHER; note = 2'-O-methyluridine-3'-phosphate
  modified_base 20: mod_base = OTHER; note = 2'-O-methyladenosine-3'-phosphate
  modified_base 21: mod_base = OTHER; note = 2'-O-methylcytidine-3'-phosphorothioate
  modified_base 22: mod_base = OTHER; note = 2'-O-methyladenosine-3'-phosphorothioate
  modified_base 23: mod_base = OTHER; note = 2'-O-methylguanosine
agaagcatcgactgtgattacag

SEQ ID NO: 1219 - RNA, 23 nt, synthetic construct
  source 1..23: mol_type = other RNA
  modified_base 1: mod_base = OTHER; note = 2'-O-methyladenosine-3'-phosphorothioate
  modified_base 2: mod_base = OTHER; note = 2'-deoxy-2'-fluoroguanosine-3'-phosphorothioate
  modified_base 3: mod_base = OTHER; note = 2'-O-methyluridine-3'-phosphate
  modified_base 4: mod_base = OTHER; note = 2'-O-methylguanosine-3'-phosphate
  modified_base 5: mod_base = OTHER; note = 2'-O-methylguanosine-3'-phosphate
  modified_base 6: mod_base = OTHER; note = 2'-deoxy-2'-fluorouridine-3'-phosphate
  modified_base 7: mod_base = OTHER; note = 2'-O-methylcytidine-3'-phosphate
  modified_base 8: mod_base = OTHER; note = 2'-deoxy-2'-fluorouridine-3'-phosphate
  modified_base 9: mod_base = OTHER; note = 2'-deoxy-2'-fluoroguanosine-3'-phosphate
  modified_base 10: mod_base = OTHER; note = 2'-O-methylguanosine-3'-phosphate
  modified_base 11: mod_base = OTHER; note = 2'-O-methyladenosine-3'-phosphate
  modified_base 12: mod_base = OTHER; note = 2'-O-methyladenosine-3'-phosphate
  modified_base 13: mod_base = OTHER; note = 2'-O-methylguanosine-3'-phosphate
  modified_base 14: mod_base = OTHER; note = 2'-deoxy-2'-fluorocytidine-3'-phosphate
  modified_base 15: mod_base = OTHER; note = 2'-O-methyladenosine-3'-phosphate
  modified_base 16: mod_base = OTHER; note = 2'-deoxy-2'-fluorouridine-3'-phosphate
  modified_base 17: mod_base = OTHER; note = 2'-O-methylcytidine-3'-phosphate
  modified_base 18: mod_base = OTHER; note = 2'-O-methylguanosine-3'-phosphate
  modified_base 19: mod_base = OTHER; note = 2'-O-methyladenosine-3'-phosphate
  modified_base 20: mod_base = OTHER; note = 2'-O-methylcytidine-3'-phosphate
  modified_base 21: mod_base = OTHER; note = 2'-O-methyluridine-3'-phosphorothioate
  modified_base 22: mod_base = OTHER; note = 2'-O-methylguanosine-3'-phosphorothioate
  modified_base 23: mod_base = OTHER; note = 2'-O-methyluridine
agtggtctggaagcatcgactgt

SEQ ID NO: 1220 - RNA, 23 nt, synthetic construct
  source 1..23: mol_type = other RNA
  modified_base 1: mod_base = OTHER; note = 2'-O-methyladenosine-3'-phosphorothioate
  modified_base 2: mod_base = OTHER; note = 2'-deoxy-2'-fluoroadenosine-3'-phosphorothioate
  modified_base 3: mod_base = OTHER; note = 2'-O-methyladenosine-3'-phosphate
  modified_base 4: mod_base = OTHER; note = 2'-O-methyladenosine-3'-phosphate
  modified_base 5: mod_base = OTHER; note = 2'-O-methylguanosine-3'-phosphate
  modified_base 6: mod_base = OTHER; note = 2'-deoxy-2'-fluoroguanosine-3'-phosphate
  modified_base 7: mod_base = OTHER; note = 2'-O-methylcytidine-3'-phosphate
  modified_base 8: mod_base = OTHER; note = 2'-deoxy-2'-fluorouridine-3'-phosphate
  modified_base 9: mod_base = OTHER; note = 2'-deoxy-2'-fluoroguanosine-3'-phosphate
  modified_base 10: mod_base = OTHER; note = 2'-O-methyluridine-3'-phosphate
  modified_base 11: mod_base = OTHER; note = 2'-O-methylguanosine-3'-phosphate
  modified_base 12: mod_base = OTHER; note = 2'-O-methylguanosine-3'-phosphate
  modified_base 13: mod_base = OTHER; note = 2'-O-methyluridine-3'-phosphate
  modified_base 14: mod_base = OTHER; note = 2'-deoxy-2'-fluorocytidine-3'-phosphate
  modified_base 15: mod_base = OTHER; note = 2'-O-methyluridine-3'-phosphate
  modified_base 16: mod_base = OTHER; note = 2'-deoxy-2'-fluoroguanosine-3'-phosphate
  modified_base 17: mod_base = OTHER; note = 2'-O-methylguanosine-3'-phosphate
  modified_base 18: mod_base = OTHER; note = 2'-O-methyladenosine-3'-phosphate
  modified_base 19: mod_base = OTHER; note = 2'-O-methyladenosine-3'-phosphate
  modified_base 20: mod_base = OTHER; note = 2'-O-methylguanosine-3'-phosphate
  modified_base 21: mod_base = OTHER; note = 2'-O-methylcytidine-3'-phosphorothioate
  modified_base 22: mod_base = OTHER; note = 2'-O-methyladenosine-3'-phosphorothioate
  modified_base 23: mod_base = OTHER; note = 2'-O-methyluridine
aaaaggctgtggtctggaagcat

SEQ ID NO: 1221 - RNA, 23 nt, synthetic construct
  source 1..23: mol_type = other RNA
  modified_base 1: mod_base = OTHER; note = 2'-O-methyladenosine-3'-phosphorothioate
  modified_base 2: mod_base = OTHER; note = 2'-deoxy-2'-fluorocytidine-3'-phosphorothioate
  modified_base 3: mod_base = OTHER; note = 2'-O-methylcytidine-3'-phosphate
  modified_base 4: mod_base = OTHER; note = 2'-O-methyladenosine-3'-phosphate
  modified_base 5: mod_base = OTHER; note = 2'-O-methyluridine-3'-phosphate
  modified_base 6: mod_base = OTHER; note = 2'-deoxy-2'-fluoroguanosine-3'-phosphate
  modified_base 7: mod_base = OTHER; note = 2'-O-methyladenosine-3'-phosphate
  modified_base 8: mod_base = OTHER; note = 2'-deoxy-2'-fluoroadenosine-3'-phosphate
  modified_base 9: mod_base = OTHER; note = 2'-deoxy-2'-fluoroadenosine-3'-phosphate
  modified_base 10: mod_base = OTHER; note = 2'-O-methylguanosine-3'-phosphate
  modified_base 11: mod_base = OTHER; note = 2'-O-methylguanosine-3'-phosphate
  modified_base 12: mod_base = OTHER; note = 2'-O-methylcytidine-3'-phosphate
  modified_base 13: mod_base = OTHER; note = 2'-O-methyluridine-3'-phosphate
  modified_base 14: mod_base = OTHER; note = 2'-deoxy-2'-fluoroguanosine-3'-phosphate
  modified_base 15: mod_base = OTHER; note = 2'-O-methyluridine-3'-phosphate
  modified_base 16: mod_base = OTHER; note = 2'-deoxy-2'-fluoroguanosine-3'-phosphate
  modified_base 17: mod_base = OTHER; note = 2'-O-methylguanosine-3'-phosphate
  modified_base 18: mod_base = OTHER; note = 2'-O-methyluridine-3'-phosphate
  modified_base 19: mod_base = OTHER; note = 2'-O-methylcytidine-3'-phosphate
  modified_base 20: mod_base = OTHER; note = 2'-O-methyluridine-3'-phosphate
  modified_base 21: mod_base = OTHER; note = 2'-O-methylguanosine-3'-phosphorothioate
  modified_base 22: mod_base = OTHER; note = 2'-O-methylguanosine-3'-phosphorothioate
  modified_base 23: mod_base = OTHER; note = 2'-O-methyladenosine
accatgaaaggctgtggtctgga

SEQ ID NO: 1222 - RNA, 23 nt, synthetic construct
  source 1..23: mol_type = other RNA
  modified_base 1: mod_base = OTHER; note = 2'-O-methyladenosine-3'-phosphorothioate
  modified_base 2: mod_base = OTHER; note = 2'-deoxy-2'-fluoroadenosine-3'-phosphorothioate
  modified_base 3: mod_base = OTHER; note = 2'-O-methylcytidine-3'-phosphate
  modified_base 4: mod_base = OTHER; note = 2'-O-methyladenosine-3'-phosphate
  modified_base 5: mod_base = OTHER; note = 2'-O-methylcytidine-3'-phosphate
  modified_base 6: mod_base = OTHER; note = 2'-deoxy-2'-fluorouridine-3'-phosphate
  modified_base 7: mod_base = OTHER; note = 2'-O-methylguanosine-3'-phosphate
  modified_base 8: mod_base = OTHER; note = 2'-deoxy-2'-fluoroguanosine-3'-phosphate
  modified_base 9: mod_base = OTHER; note = 2'-deoxy-2'-fluoroadenosine-3'-phosphate
  modified_base 10: mod_base = OTHER; note = 2'-O-methyluridine-3'-phosphate
  modified_base 11: mod_base = OTHER; note = 2'-O-methylguanosine-3'-phosphate
  modified_base 12: mod_base = OTHER; note = 2'-O-methylguanosine-3'-phosphate
  modified_base 13: mod_base = OTHER; note = 2'-O-methylguanosine-3'-phosphate
  modified_base 14: mod_base = OTHER; note = 2'-deoxy-2'-fluoroadenosine-3'-phosphate
  modified_base 15: mod_base = OTHER; note = 2'-O-methyluridine-3'-phosphate
  modified_base 16: mod_base = OTHER; note = 2'-deoxy-2'-fluorocytidine-3'-phosphate
  modified_base 17: mod_base = OTHER; note = 2'-O-methyluridine-3'-phosphate
  modified_base 18: mod_base = OTHER; note = 2'-O-methylcytidine-3'-phosphate
  modified_base 19: mod_base = OTHER; note = 2'-O-methylcytidine-3'-phosphate
  modified_base 20: mod_base = OTHER; note = 2'-O-methyladenosine-3'-phosphate
  modified_base 21: mod_base = OTHER; note = 2'-O-methylcytidine-3'-phosphorothioate
  modified_base 22: mod_base = OTHER; note = 2'-O-methylcytidine-3'-phosphorothioate
  modified_base 23: mod_base = OTHER; note = 2'-O-methyluridine
aacactggatgggatctccacct

SEQ ID NO: 1223 - RNA, 23 nt, synthetic construct
  source 1..23: mol_type = other RNA
  modified_base 1: mod_base = OTHER; note = 2'-O-methyladenosine-3'-phosphorothioate
  modified_base 2: mod_base = OTHER; note = 2'-deoxy-2'-fluoroadenosine-3'-phosphorothioate
  modified_base 3: mod_base = OTHER; note = 2'-O-methyluridine-3'-phosphate
  modified_base 4: mod_base = OTHER; note = 2'-O-methylguanosine-3'-phosphate
  modified_base 5: mod_base = OTHER; note = 2'-O-methylguanosine-3'-phosphate
  modified_base 6: mod_base = OTHER; note = 2'-deoxy-2'-fluorocytidine-3'-phosphate
  modified_base 7: mod_base = OTHER; note = 2'-O-methyladenosine-3'-phosphate
  modified_base 8: mod_base = OTHER; note = 2'-deoxy-2'-fluorocytidine-3'-phosphate
  modified_base 9: mod_base = OTHER; note = 2'-deoxy-2'-fluoroadenosine-3'-phosphate
  modified_base 10: mod_base = OTHER; note = 2'-O-methylcytidine-3'-phosphate
  modified_base 11: mod_base = OTHER; note = 2'-O-methyluridine-3'-phosphate
  modified_base 12: mod_base = OTHER; note = 2'-O-methylguanosine-3'-phosphate
  modified_base 13: mod_base = OTHER; note = 2'-O-methylguanosine-3'-phosphate
  modified_base 14: mod_base = OTHER; note = 2'-deoxy-2'-fluoroadenosine-3'-phosphate
  modified_base 15: mod_base = OTHER; note = 2'-O-methyluridine-3'-phosphate
  modified_base 16: mod_base = OTHER; note = 2'-deoxy-2'-fluoroguanosine-3'-phosphate
  modified_base 17: mod_base = OTHER; note = 2'-O-methylguanosine-3'-phosphate
  modified_base 18: mod_base = OTHER; note = 2'-O-methylguanosine-3'-phosphate
  modified_base 19: mod_base = OTHER; note = 2'-O-methyladenosine-3'-phosphate
  modified_base 20: mod_base = OTHER; note = 2'-O-methyluridine-3'-phosphate
  modified_base 21: mod_base = OTHER; note = 2'-O-methylcytidine-3'-phosphorothioate
  modified_base 22: mod_base = OTHER; note = 2'-O-methyluridine-3'-phosphorothioate
  modified_base 23: mod_base = OTHER; note = 2'-O-methylcytidine
aatggcacactggatgggatctc

SEQ ID NO: 1224 - RNA, 23 nt, synthetic construct
  source 1..23: mol_type = other RNA
  modified_base 1: mod_base = OTHER; note = 2'-O-methyladenosine-3'-phosphorothioate
  modified_base 2: mod_base = OTHER; note = 2'-deoxy-2'-fluoroguanosine-3'-phosphorothioate
  modified_base 3: mod_base = OTHER; note = 2'-O-methyluridine-3'-phosphate
  modified_base 4: mod_base = OTHER; note = 2'-O-methyluridine-3'-phosphate
  modified_base 5: mod_base = OTHER; note = 2'-O-methylcytidine-3'-phosphate
  modified_base 6: mod_base = OTHER; note = 2'-deoxy-2'-fluorocytidine-3'-phosphate
  modified_base 7: mod_base = OTHER; note = 2'-O-methyluridine-3'-phosphate
  modified_base 8: mod_base = OTHER; note = 2'-deoxy-2'-fluoroadenosine-3'-phosphate
  modified_base 9: mod_base = OTHER; note = 2'-deoxy-2'-fluorouridine-3'-phosphate
  modified_base 10: mod_base = OTHER; note = 2'-O-methyladenosine-3'-phosphate
  modified_base 11: mod_base = OTHER; note = 2'-O-methylcytidine-3'-phosphate
  modified_base 12: mod_base = OTHER; note = 2'-O-methyladenosine-3'-phosphate
  modified_base 13: mod_base = OTHER; note = 2'-O-methylguanosine-3'-phosphate
  modified_base 14: mod_base = OTHER; note = 2'-deoxy-2'-fluoroadenosine-3'-phosphate
  modified_base 15: mod_base = OTHER; note = 2'-O-methylguanosine-3'-phosphate
  modified_base 16: mod_base = OTHER; note = 2'-deoxy-2'-fluorocytidine-3'-phosphate
  modified_base 17: mod_base = OTHER; note = 2'-O-methylcytidine-3'-phosphate
  modified_base 18: mod_base = OTHER; note = 2'-O-methylguanosine-3'-phosphate
  modified_base 19: mod_base = OTHER; note = 2'-O-methylguanosine-3'-phosphate
  modified_base 20: mod_base = OTHER; note = 2'-O-methylcytidine-3'-phosphate
  modified_base 21: mod_base = OTHER; note = 2'-O-methyladenosine-3'-phosphorothioate
  modified_base 22: mod_base = OTHER; note = 2'-O-methyluridine-3'-phosphorothioate
  modified_base 23: mod_base = OTHER; note = 2'-O-methylguanosine
agttcctatacagagccggcatg

SEQ ID NO: 1225 - RNA, 23 nt, synthetic construct
  source 1..23: mol_type = other RNA
  modified_base 1: mod_base = OTHER; note = 2'-O-methyladenosine-3'-phosphorothioate
  modified_base 2: mod_base = OTHER; note = 2'-deoxy-2'-fluorouridine-3'-phosphorothioate
  modified_base 3: mod_base = OTHER; note = 2'-O-methyluridine-3'-phosphate
  modified_base 4: mod_base = OTHER; note = 2'-O-methylcytidine-3'-phosphate
  modified_base 5: mod_base = OTHER; note = 2'-O-methyluridine-3'-phosphate
  modified_base 6: mod_base = OTHER; note = 2'-deoxy-2'-fluoroguanosine-3'-phosphate
  modified_base 7: mod_base = OTHER; note = 2'-O-methylguanosine-3'-phosphate
  modified_base 8: mod_base = OTHER; note = 2'-deoxy-2'-fluorouridine-3'-phosphate
  modified_base 9: mod_base = OTHER; note = 2'-deoxy-2'-fluorouridine-3'-phosphate
  modified_base 10: mod_base = OTHER; note = 2'-O-methylcytidine-3'-phosphate
  modified_base 11: mod_base = OTHER; note = 2'-O-methylcytidine-3'-phosphate
  modified_base 12: mod_base = OTHER; note = 2'-O-methyluridine-3'-phosphate
  modified_base 13: mod_base = OTHER; note = 2'-O-methyladenosine-3'-phosphate
  modified_base 14: mod_base = OTHER; note = 2'-deoxy-2'-fluorouridine-3'-phosphate
  modified_base 15: mod_base = OTHER; note = 2'-O-methyladenosine-3'-phosphate
  modified_base 16: mod_base = OTHER; note = 2'-deoxy-2'-fluorocytidine-3'-phosphate
  modified_base 17: mod_base = OTHER; note = 2'-O-methyladenosine-3'-phosphate
  modified_base 18: mod_base = OTHER; note = 2'-O-methylguanosine-3'-phosphate
  modified_base 19: mod_base = OTHER; note = 2'-O-methyladenosine-3'-phosphate
  modified_base 20: mod_base = OTHER; note = 2'-O-methylguanosine-3'-phosphate
  modified_base 21: mod_base = OTHER; note = 2'-O-methylcytidine-3'-phosphorothioate
  modified_base 22: mod_base = OTHER; note = 2'-O-methylcytidine-3'-phosphorothioate
  modified_base 23: mod_base = OTHER; note = 2'-O-methylguanosine
attctggttcctatacagagccg

SEQ ID NO: 1226 - RNA, 23 nt, synthetic construct
  source 1..23: mol_type = other RNA
  modified_base 1: mod_base = OTHER; note = 2'-O-methyladenosine-3'-phosphorothioate
  modified_base 2: mod_base = OTHER; note = 2'-deoxy-2'-fluorouridine-3'-phosphorothioate
  modified_base 3: mod_base = OTHER; note = 2'-O-methylguanosine-3'-phosphate
  modified_base 4: mod_base = OTHER; note = 2'-O-methyluridine-3'-phosphate
  modified_base 5: mod_base = OTHER; note = 2'-O-methyladenosine-3'-phosphate
  modified_base 6: mod_base = OTHER; note = 2'-deoxy-2'-fluoroadenosine-3'-phosphate
  modified_base 7: mod_base = OTHER; note = 2'-O-methyluridine-3'-phosphate
  modified_base 8: mod_base = OTHER; note = 2'-deoxy-2'-fluorouridine-3'-phosphate
  modified_base 9: mod_base = OTHER; note = 2'-deoxy-2'-fluorocytidine-3'-phosphate
  modified_base 10: mod_base = OTHER; note = 2'-O-methyluridine-3'-phosphate
  modified_base 11: mod_base = OTHER; note = 2'-O-methylguanosine-3'-phosphate
  modified_base 12: mod_base = OTHER; note = 2'-O-methylguanosine-3'-phosphate
  modified_base 13: mod_base = OTHER; note = 2'-O-methyluridine-3'-phosphate
  modified_base 14: mod_base = OTHER; note = 2'-deoxy-2'-fluorouridine-3'-phosphate
  modified_base 15: mod_base = OTHER; note = 2'-O-methylcytidine-3'-phosphate
  modified_base 16: mod_base = OTHER; note = 2'-deoxy-2'-fluorocytidine-3'-phosphate
  modified_base 17: mod_base = OTHER; note = 2'-O-methyluridine-3'-phosphate
  modified_base 18: mod_base = OTHER; note = 2'-O-methyladenosine-3'-phosphate
  modified_base 19: mod_base = OTHER; note = 2'-O-methyluridine-3'-phosphate
  modified_base 20: mod_base = OTHER; note = 2'-O-methyladenosine-3'-phosphate
  modified_base 21: mod_base = OTHER; note = 2'-O-methylcytidine-3'-phosphorothioate
  modified_base 22: mod_base = OTHER; note = 2'-O-methyladenosine-3'-phosphorothioate
  modified_base 23: mod_base = OTHER; note = 2'-O-methylguanosine
atgtaattctggttcctatacag

SEQ ID NO: 1227 - RNA, 23 nt, synthetic construct
  source 1..23: mol_type = other RNA
  modified_base 1: mod_base = OTHER; note = 2'-O-methyladenosine-3'-phosphorothioate
  modified_base 2: mod_base = OTHER; note = 2'-deoxy-2'-fluoroguanosine-3'-phosphorothioate
  modified_base 3: mod_base = OTHER; note = 2'-O-methyluridine-3'-phosphate
  modified_base 4: mod_base = OTHER; note = 2'-O-methyluridine-3'-phosphate
  modified_base 5: mod_base = OTHER; note = 2'-O-methyluridine-3'-phosphate
  modified_base 6: mod_base = OTHER; note = 2'-deoxy-2'-fluoroguanosine-3'-phosphate
  modified_base 7: mod_base = OTHER; note = 2'-O-methyluridine-3'-phosphate
  modified_base 8: mod_base = OTHER; note = 2'-deoxy-2'-fluorouridine-3'-phosphate
  modified_base 9: mod_base = OTHER; note = 2'-deoxy-2'-fluoroguanosine-3'-phosphate
  modified_base 10: mod_base = OTHER; note = 2'-O-methyluridine-3'-phosphate
  modified_base 11: mod_base = OTHER; note = 2'-O-methyladenosine-3'-phosphate
  modified_base 12: mod_base = OTHER; note = 2'-O-methyladenosine-3'-phosphate
  modified_base 13: mod_base = OTHER; note = 2'-O-methyluridine-3'-phosphate
  modified_base 14: mod_base = OTHER; note = 2'-deoxy-2'-fluorouridine-3'-phosphate
  modified_base 15: mod_base = OTHER; note = 2'-O-methylcytidine-3'-phosphate
  modified_base 16: mod_base = OTHER; note = 2'-deoxy-2'-fluorouridine-3'-phosphate
  modified_base 17: mod_base = OTHER; note = 2'-O-methylguanosine-3'-phosphate
  modified_base 18: mod_base = OTHER; note = 2'-O-methylguanosine-3'-phosphate
  modified_base 19: mod_base = OTHER; note = 2'-O-methyluridine-3'-phosphate
  modified_base 20: mod_base = OTHER; note = 2'-O-methyluridine-3'-phosphate
  modified_base 21: mod_base = OTHER; note = 2'-O-methylcytidine-3'-phosphorothioate
  modified_base 22: mod_base = OTHER; note = 2'-O-methylcytidine-3'-phosphorothioate
  modified_base 23: mod_base = OTHER; note = 2'-O-methyluridine
agtttgttgtaattctggttcct

SEQ ID NO: 1228 - RNA, 23 nt, synthetic construct
  source 1..23: mol_type = other RNA
  modified_base 1: mod_base = OTHER; note = 2'-O-methyladenosine-3'-phosphorothioate
  modified_base 2: mod_base = OTHER; note = 2'-deoxy-2'-fluorouridine-3'-phosphorothioate
  modified_base 3: mod_base = OTHER; note = 2'-O-methylguanosine-3'-phosphate
  modified_base 4: mod_base = OTHER; note = 2'-O-methylcytidine-3'-phosphate
  modified_base 5: mod_base = OTHER; note = 2'-O-methyluridine-3'-phosphate
  modified_base 6: mod_base = OTHER; note = 2'-deoxy-2'-fluoroguanosine-3'-phosphate
  modified_base 7: mod_base = OTHER; note = 2'-O-methylcytidine-3'-phosphate
  modified_base 8: mod_base = OTHER; note = 2'-deoxy-2'-fluoroadenosine-3'-phosphate
  modified_base 9: mod_base = OTHER; note = 2'-deoxy-2'-fluoroguanosine-3'-phosphate
  modified_base 10: mod_base = OTHER; note = 2'-O-methyluridine-3'-phosphate
  modified_base 11: mod_base = OTHER; note = 2'-O-methyluridine-3'-phosphate
  modified_base 12: mod_base = OTHER; note = 2'-O-methyluridine-3'-phosphate
  modified_base 13: mod_base = OTHER; note = 2'-O-methylguanosine-3'-phosphate
  modified_base 14: mod_base = OTHER; note = 2'-deoxy-2'-fluorouridine-3'-phosphate
  modified_base 15: mod_base = OTHER; note = 2'-O-methyluridine-3'-phosphate
  modified_base 16: mod_base = OTHER; note = 2'-deoxy-2'-fluoroguanosine-3'-phosphate
  modified_base 17: mod_base = OTHER; note = 2'-O-methyluridine-3'-phosphate
  modified_base 18: mod_base = OTHER; note = 2'-O-methyladenosine-3'-phosphate
  modified_base 19: mod_base = OTHER; note = 2'-O-methyladenosine-3'-phosphate
  modified_base 20: mod_base = OTHER; note = 2'-O-methyluridine-3'-phosphate
  modified_base 21: mod_base = OTHER; note = 2'-O-methyluridine-3'-phosphorothioate
  modified_base 22: mod_base = OTHER; note = 2'-O-methylcytidine-3'-phosphorothioate
  modified_base 23: mod_base = OTHER; note = 2'-O-methyluridine
atgctgcagtttgttgtaattct

SEQ ID NO: 1229 - RNA, 23 nt, synthetic construct
  source 1..23: mol_type = other RNA
  modified_base 1: mod_base = OTHER; note = 2'-O-methyladenosine-3'-phosphorothioate
  modified_base 2: mod_base = OTHER; note = 2'-deoxy-2'-fluorouridine-3'-phosphorothioate
  modified_base 3: mod_base = OTHER; note = 2'-O-methylguanosine-3'-phosphate
  modified_base 4: mod_base = OTHER; note = 2'-O-methyladenosine-3'-phosphate
  modified_base 5: mod_base = OTHER; note = 2'-O-methyladenosine-3'-phosphate
  modified_base 6: mod_base = OTHER; note = 2'-deoxy-2'-fluorocytidine-3'-phosphate
  modified_base 7: mod_base = OTHER; note = 2'-O-methylguanosine-3'-phosphate
  modified_base 8: mod_base = OTHER; note = 2'-deoxy-2'-fluorouridine-3'-phosphate
  modified_base 9: mod_base = OTHER; note = 2'-deoxy-2'-fluoroguanosine-3'-phosphate
  modified_base 10: mod_base = OTHER; note = 2'-O-methylcytidine-3'-phosphate
  modified_base 11: mod_base = OTHER; note = 2'-O-methyluridine-3'-phosphate
  modified_base 12: mod_base = OTHER; note = 2'-O-methylguanosine-3'-phosphate
  modified_base 13: mod_base = OTHER; note = 2'-O-methylcytidine-3'-phosphate
  modified_base 14: mod_base = OTHER; note = 2'-deoxy-2'-fluoroadenosine-3'-phosphate
  modified_base 15: mod_base = OTHER; note = 2'-O-methylguanosine-3'-phosphate
  modified_base 16: mod_base = OTHER; note = 2'-deoxy-2'-fluorouridine-3'-phosphate
  modified_base 17: mod_base = OTHER; note = 2'-O-methyluridine-3'-phosphate
  modified_base 18: mod_base = OTHER; note = 2'-O-methyluridine-3'-phosphate
  modified_base 19: mod_base = OTHER; note = 2'-O-methylguanosine-3'-phosphate
  modified_base 20: mod_base = OTHER; note = 2'-O-methyluridine-3'-phosphate
  modified_base 21: mod_base = OTHER; note = 2'-O-methyluridine-3'-phosphorothioate
  modified_base 22: mod_base = OTHER; note = 2'-O-methylguanosine-3'-phosphorothioate
  modified_base 23: mod_base = OTHER; note = 2'-O-methyluridine
atgaacgtgctgcagtttgttgt

SEQ ID NO: 1230 - RNA, 23 nt, synthetic construct
  source 1..23: mol_type = other RNA
  modified_base 1: mod_base = OTHER; note = 2'-O-methyladenosine-3'-phosphorothioate
  modified_base 2: mod_base = OTHER; note = 2'-deoxy-2'-fluorocytidine-3'-phosphorothioate
  modified_base 3: mod_base = OTHER; note = 2'-O-methylguanosine-3'-phosphate
  modified_base 4: mod_base = OTHER; note = 2'-O-methylguanosine-3'-phosphate
  modified_base 5: mod_base = OTHER; note = 2'-O-methylguanosine-3'-phosphate
  modified_base 6: mod_base = OTHER; note = 2'-deoxy-2'-fluorouridine-3'-phosphate
  modified_base 7: mod_base = OTHER; note = 2'-O-methylcytidine-3'-phosphate
  modified_base 8: mod_base = OTHER; note = 2'-deoxy-2'-fluorouridine-3'-phosphate
  modified_base 9: mod_base = OTHER; note = 2'-deoxy-2'-fluoroguanosine-3'-phosphate
  modified_base 10: mod_base = OTHER; note = 2'-O-methyladenosine-3'-phosphate
  modified_base 11: mod_base = OTHER; note = 2'-O-methyladenosine-3'-phosphate
  modified_base 12: mod_base = OTHER; note = 2'-O-methylcytidine-3'-phosphate
  modified_base 13: mod_base = OTHER; note = 2'-O-methylguanosine-3'-phosphate
  modified_base 14: mod_base = OTHER; note = 2'-deoxy-2'-fluorouridine-3'-phosphate
  modified_base 15: mod_base = OTHER; note = 2'-O-methylguanosine-3'-phosphate
  modified_base 16: mod_base = OTHER; note = 2'-deoxy-2'-fluorocytidine-3'-phosphate
  modified_base 17: mod_base = OTHER; note = 2'-O-methyluridine-3'-phosphate
  modified_base 18: mod_base = OTHER; note = 2'-O-methylguanosine-3'-phosphate
  modified_base 19: mod_base = OTHER; note = 2'-O-methylcytidine-3'-phosphate
  modified_base 20: mod_base = OTHER; note = 2'-O-methyladenosine-3'-phosphate
  modified_base 21: mod_base = OTHER; note = 2'-O-methylguanosine-3'-phosphorothioate
  modified_base 22: mod_base = OTHER; note = 2'-O-methyluridine-3'-phosphorothioate
  modified_base 23: mod_base = OTHER; note = 2'-O-methyluridine
acgggtctgaacgtgctgcagtt

SEQ ID NO: 1231 - RNA, 23 nt, synthetic construct
  source 1..23: mol_type = other RNA
  modified_base 1: mod_base = OTHER; note = 2'-O-methyladenosine-3'-phosphorothioate
  modified_base 2: mod_base = OTHER; note = 2'-deoxy-2'-fluorouridine-3'-phosphorothioate
  modified_base 3: mod_base = OTHER; note = 2'-O-methyladenosine-3'-phosphate
  modified_base 4: mod_base = OTHER; note = 2'-O-methyluridine-3'-phosphate
  modified_base 5: mod_base = OTHER; note = 2'-O-methylcytidine-3'-phosphate
  modified_base 6: mod_base = OTHER; note = 2'-deoxy-2'-fluorocytidine-3'-phosphate
  modified_base 7: mod_base = OTHER; note = 2'-O-methyladenosine-3'-phosphate
  modified_base 8: mod_base = OTHER; note = 2'-deoxy-2'-fluorocytidine-3'-phosphate
  modified_base 9: mod_base = OTHER; note = 2'-deoxy-2'-fluoroguanosine-3'-phosphate
  modified_base 10: mod_base = OTHER; note = 2'-O-methylguanosine-3'-phosphate
  modified_base 11: mod_base = OTHER; note = 2'-O-methylguanosine-3'-phosphate
  modified_base 12: mod_base = OTHER; note = 2'-O-methyluridine-3'-phosphate
  modified_base 13: mod_base = OTHER; note = 2'-O-methylcytidine-3'-phosphate
  modified_base 14: mod_base = OTHER; note = 2'-deoxy-2'-fluorouridine-3'-phosphate
  modified_base 15: mod_base = OTHER; note = 2'-O-methylguanosine-3'-phosphate
  modified_base 16: mod_base = OTHER; note = 2'-deoxy-2'-fluoroadenosine-3'-phosphate
  modified_base 17: mod_base = OTHER; note = 2'-O-methyladenosine-3'-phosphate
  modified_base 18: mod_base = OTHER; note = 2'-O-methylcytidine-3'-phosphate
  modified_base 19: mod_base = OTHER; note = 2'-O-methylguanosine-3'-phosphate
  modified_base 20: mod_base = OTHER; note = 2'-O-methyluridine-3'-phosphate
  modified_base 21: mod_base = OTHER; note = 2'-O-methylguanosine-3'-phosphorothioate
  modified_base 22: mod_base = OTHER; note = 2'-O-methylcytidine-3'-phosphorothioate
  modified_base 23: mod_base = OTHER; note = 2'-O-methyluridine
atatccacgggtctgaacgtgct

SEQ ID NO: 1232 - RNA, 23 nt, synthetic construct
  source 1..23: mol_type = other RNA
  modified_base 1: mod_base = OTHER; note = 2'-O-methyladenosine-3'-phosphorothioate
  modified_base 2: mod_base = OTHER; note = 2'-deoxy-2'-fluorouridine-3'-phosphorothioate
  modified_base 3: mod_base = OTHER; note = 2'-O-methyluridine-3'-phosphate
  modified_base 4: mod_base = OTHER; note = 2'-O-methylguanosine-3'-phosphate
  modified_base 5: mod_base = OTHER; note = 2'-O-methylguanosine-3'-phosphate
  modified_base 6: mod_base = OTHER; note = 2'-deoxy-2'-fluorouridine-3'-phosphate
  modified_base 7: mod_base = OTHER; note = 2'-O-methyladenosine-3'-phosphate
  modified_base 8: mod_base = OTHER; note = 2'-deoxy-2'-fluorouridine-3'-phosphate
  modified_base 9: mod_base = OTHER; note = 2'-deoxy-2'-fluoroadenosine-3'-phosphate
  modified_base 10: mod_base = OTHER; note = 2'-O-methyluridine-3'-phosphate
  modified_base 11: mod_base = OTHER; note = 2'-O-methylcytidine-3'-phosphate
  modified_base 12: mod_base = OTHER; note = 2'-O-methylcytidine-3'-phosphate
  modified_base 13: mod_base = OTHER; note = 2'-O-methyladenosine-3'-phosphate
  modified_base 14: mod_base = OTHER; note = 2'-deoxy-2'-fluorocytidine-3'-phosphate
  modified_base 15: mod_base = OTHER; note = 2'-O-methylguanosine-3'-phosphate
  modified_base 16: mod_base = OTHER; note = 2'-deoxy-2'-fluoroguanosine-3'-phosphate
  modified_base 17: mod_base = OTHER; note = 2'-O-methylguanosine-3'-phosphate
  modified_base 18: mod_base = OTHER; note = 2'-O-methyluridine-3'-phosphate
  modified_base 19: mod_base = OTHER; note = 2'-O-methylcytidine-3'-phosphate
  modified_base 20: mod_base = OTHER; note = 2'-O-methyluridine-3'-phosphate
  modified_base 21: mod_base = OTHER; note = 2'-O-methylguanosine-3'-phosphorothioate
  modified_base 22: mod_base = OTHER; note = 2'-O-methyladenosine-3'-phosphorothioate
  modified_base 23: mod_base = OTHER; note = 2'-O-methyladenosine
attggtatatccacgggtctgaa

SEQ ID NO: 1233 - RNA, 23 nt, synthetic construct
  source 1..23: mol_type = other RNA
  modified_base 1: mod_base = OTHER; note = 2'-O-methyladenosine-3'-phosphorothioate
  modified_base 2: mod_base = OTHER; note = 2'-deoxy-2'-fluoroguanosine-3'-phosphorothioate
  modified_base 3: mod_base = OTHER; note = 2'-O-methyladenosine-3'-phosphate
  modified_base 4: mod_base = OTHER; note = 2'-O-methylcytidine-3'-phosphate
  modified_base 5: mod_base = OTHER; note = 2'-O-methyluridine-3'-phosphate
  modified_base 6: mod_base = OTHER; note = 2'-deoxy-2'-fluorocytidine-3'-phosphate
  modified_base 7: mod_base = OTHER; note = 2'-O-methyluridine-3'-phosphate
  modified_base 8: mod_base = OTHER; note = 2'-deoxy-2'-fluorouridine-3'-phosphate
  modified_base 9: mod_base = OTHER; note = 2'-deoxy-2'-fluoroguanosine-3'-phosphate
  modified_base 10: mod_base = OTHER; note = 2'-O-methylguanosine-3'-phosphate
  modified_base 11: mod_base = OTHER; note = 2'-O-methyluridine-3'-phosphate
  modified_base 12: mod_base = OTHER; note = 2'-O-methyladenosine-3'-phosphate
  modified_base 13: mod_base = OTHER; note = 2'-O-methyluridine-3'-phosphate
  modified_base 14: mod_base = OTHER; note = 2'-deoxy-2'-fluoroadenosine-3'-phosphate
  modified_base 15: mod_base = OTHER; note = 2'-O-methyluridine-3'-phosphate
  modified_base 16: mod_base = OTHER; note = 2'-deoxy-2'-fluorocytidine-3'-phosphate
  modified_base 17: mod_base = OTHER; note = 2'-O-methylcytidine-3'-phosphate
  modified_base 18: mod_base = OTHER; note = 2'-O-methyladenosine-3'-phosphate
  modified_base 19: mod_base = OTHER; note = 2'-O-methylcytidine-3'-phosphate
  modified_base 20: mod_base = OTHER; note = 2'-O-methylguanosine-3'-phosphate
  modified_base 21: mod_base = OTHER; note = 2'-O-methylguanosine-3'-phosphorothioate
  modified_base 22: mod_base = OTHER; note = 2'-O-methylguanosine-3'-phosphorothioate
  modified_base 23: mod_base = OTHER; note = 2'-O-methyluridine
agactcttggtatatccacgggt

SEQ ID NO: 1234 - RNA, 23 nt, synthetic construct
  source 1..23: mol_type = other RNA
  modified_base 1: mod_base = OTHER; note = 2'-O-methyladenosine-3'-phosphorothioate
  modified_base 2: mod_base = OTHER; note = 2'-deoxy-2'-fluoroguanosine-3'-phosphorothioate
  modified_base 3: mod_base = OTHER; note = 2'-O-methyluridine-3'-phosphate
  modified_base 4: mod_base = OTHER; note = 2'-O-methyluridine-3'-phosphate
  modified_base 5: mod_base = OTHER; note = 2'-O-methylguanosine-3'-phosphate
  modified_base 6: mod_base = OTHER; note = 2'-deoxy-2'-fluoroguanosine-3'-phosphate
  modified_base 7: mod_base = OTHER; note = 2'-O-methylguanosine-3'-phosphate
  modified_base 8: mod_base = OTHER; note = 2'-deoxy-2'-fluoroadenosine-3'-phosphate
  modified_base 9: mod_base = OTHER; note = 2'-deoxy-2'-fluorocytidine-3'-phosphate
  modified_base 10: mod_base = OTHER; note = 2'-O-methyluridine-3'-phosphate
  modified_base 11: mod_base = OTHER; note = 2'-O-methylcytidine-3'-phosphate
  modified_base 12: mod_base = OTHER; note = 2'-O-methyluridine-3'-phosphate
  modified_base 13: mod_base = OTHER; note = 2'-O-methyluridine-3'-phosphate
  modified_base 14: mod_base = OTHER; note = 2'-deoxy-2'-fluoroguanosine-3'-phosphate
  modified_base 15: mod_base = OTHER; note = 2'-O-methylguanosine-3'-phosphate
  modified_base 16: mod_base = OTHER; note = 2'-deoxy-2'-fluorouridine-3'-phosphate
  modified_base 17: mod_base = OTHER; note = 2'-O-methyladenosine-3'-phosphate
  modified_base 18: mod_base = OTHER; note = 2'-O-methyluridine-3'-phosphate
  modified_base 19: mod_base = OTHER; note = 2'-O-methyladenosine-3'-phosphate
  modified_base 20: mod_base = OTHER; note = 2'-O-methyluridine-3'-phosphate
  modified_base 21: mod_base = OTHER; note = 2'-O-methylcytidine-3'-phosphorothioate
  modified_base 22: mod_base = OTHER; note = 2'-O-methylcytidine-3'-phosphorothioate
  modified_base 23: mod_base = OTHER; note = 2'-O-methyladenosine
agttgggactcttggtatatcca

SEQ ID NO: 1235 - RNA, 23 nt, synthetic construct
  source 1..23: mol_type = other RNA
  modified_base 1: mod_base = OTHER; note = 2'-O-methyladenosine-3'-phosphorothioate
  modified_base 2: mod_base = OTHER; note = 2'-deoxy-2'-fluoroadenosine-3'-phosphorothioate
  modified_base 3: mod_base = OTHER; note = 2'-O-methylguanosine-3'-phosphate
  modified_base 4: mod_base = OTHER; note = 2'-O-methyluridine-3'-phosphate
  modified_base 5: mod_base = OTHER; note = 2'-O-methyluridine-3'-phosphate
  modified_base 6: mod_base = OTHER; note = 2'-deoxy-2'-fluoroguanosine-3'-phosphate
  modified_base 7: mod_base = OTHER; note = 2'-O-methylguanosine-3'-phosphate
  modified_base 8: mod_base = OTHER; note = 2'-deoxy-2'-fluorouridine-3'-phosphate
  modified_base 9: mod_base = OTHER; note = 2'-deoxy-2'-fluorouridine-3'-phosphate
  modified_base 10: mod_base = OTHER; note = 2'-O-methylguanosine-3'-phosphate
  modified_base 11: mod_base = OTHER; note = 2'-O-methylguanosine-3'-phosphate
  modified_base 12: mod_base = OTHER; note = 2'-O-methylguanosine-3'-phosphate
  modified_base 13: mod_base = OTHER; note = 2'-O-methyladenosine-3'-phosphate
  modified_base 14: mod_base = OTHER; note = 2'-deoxy-2'-fluorocytidine-3'-phosphate
  modified_base 15: mod_base = OTHER; note = 2'-O-methyluridine-3'-phosphate
  modified_base 16: mod_base = OTHER; note = 2'-deoxy-2'-fluorocytidine-3'-phosphate
  modified_base 17: mod_base = OTHER; note = 2'-O-methyluridine-3'-phosphate
  modified_base 18: mod_base = OTHER; note = 2'-O-methyluridine-3'-phosphate
  modified_base 19: mod_base = OTHER; note = 2'-O-methylguanosine-3'-phosphate
  modified_base 20: mod_base = OTHER; note = 2'-O-methylguanosine-3'-phosphate
  modified_base 21: mod_base = OTHER; note = 2'-O-methyluridine-3'-phosphorothioate
  modified_base 22: mod_base = OTHER; note = 2'-O-methyladenosine-3'-phosphorothioate
  modified_base 23: mod_base = OTHER; note = 2'-O-methyluridine
aagttggttgggactcttggtat

SEQ ID NO: 1236 - RNA, 23 nt, synthetic construct
  source 1..23: mol_type = other RNA
  modified_base 1: mod_base = OTHER; note = 2'-O-methyladenosine-3'-phosphorothioate
  modified_base 2: mod_base = OTHER; note = 2'-deoxy-2'-fluoroguanosine-3'-phosphorothioate
  modified_base 3: mod_base = OTHER; note = 2'-O-methyluridine-3'-phosphate
  modified_base 4: mod_base = OTHER; note = 2'-O-methylguanosine-3'-phosphate
  modified_base 5: mod_base = OTHER; note = 2'-O-methyladenosine-3'-phosphate
  modified_base 6: mod_base = OTHER; note = 2'-deoxy-2'-fluorocytidine-3'-phosphate
  modified_base 7: mod_base = OTHER; note = 2'-O-methylcytidine-3'-phosphate
  modified_base 8: mod_base = OTHER; note = 2'-deoxy-2'-fluoroadenosine-3'-phosphate
  modified_base 9: mod_base = OTHER; note = 2'-deoxy-2'-fluoroguanosine-3'-phosphate
  modified_base 10: mod_base = OTHER; note = 2'-O-methyluridine-3'-phosphate
  modified_base 11: mod_base = OTHER; note = 2'-O-methyluridine-3'-phosphate
  modified_base 12: mod_base = OTHER; note = 2'-O-methylguanosine-3'-phosphate
  modified_base 13: mod_base = OTHER; note = 2'-O-methylguanosine-3'-phosphate
  modified_base 14: mod_base = OTHER; note = 2'-deoxy-2'-fluorouridine-3'-phosphate
  modified_base 15: mod_base = OTHER; note = 2'-O-methyluridine-3'-phosphate
  modified_base 16: mod_base = OTHER; note = 2'-deoxy-2'-fluoroguanosine-3'-phosphate
  modified_base 17: mod_base = OTHER; note = 2'-O-methylguanosine-3'-phosphate
  modified_base 18: mod_base = OTHER; note = 2'-O-methylguanosine-3'-phosphate
  modified_base 19: mod_base = OTHER; note = 2'-O-methyladenosine-3'-phosphate
  modified_base 20: mod_base = OTHER; note = 2'-O-methylcytidine-3'-phosphate
  modified_base 21: mod_base = OTHER; note = 2'-O-methyluridine-3'-phosphorothioate
  modified_base 22: mod_base = OTHER; note = 2'-O-methylcytidine-3'-phosphorothioate
  modified_base 23: mod_base = OTHER; note = 2'-O-methyluridine
agtgaccagttggttgggactct

SEQ ID NO: 1237 - RNA, 23 nt, synthetic construct
  source 1..23: mol_type = other RNA
  modified_base 1: mod_base = OTHER; note = 2'-O-methyladenosine-3'-phosphorothioate
  modified_base 2: mod_base = OTHER; note = 2'-deoxy-2'-fluoroadenosine-3'-phosphorothioate
  modified_base 3: mod_base = OTHER; note = 2'-O-methylcytidine-3'-phosphate
  modified_base 4: mod_base = OTHER; note = 2'-O-methylguanosine-3'-phosphate
  modified_base 5: mod_base = OTHER; note = 2'-O-methyladenosine-3'-phosphate
  modified_base 6: mod_base = OTHER; note = 2'-deoxy-2'-fluoroguanosine-3'-phosphate
  modified_base 7: mod_base = OTHER; note = 2'-O-methylcytidine-3'-phosphate
  modified_base 8: mod_base = OTHER; note = 2'-deoxy-2'-fluorouridine-3'-phosphate
  modified_base 9: mod_base = OTHER; note = 2'-deoxy-2'-fluoroguanosine-3'-phosphate
  modified_base 10: mod_base = OTHER; note = 2'-O-methylguanosine-3'-phosphate
  modified_base 11: mod_base = OTHER; note = 2'-O-methyladenosine-3'-phosphate
  modified_base 12: mod_base = OTHER; note = 2'-O-methylguanosine-3'-phosphate
  modified_base 13: mod_base = OTHER; note = 2'-O-methyluridine-3'-phosphate
  modified_base 14: mod_base = OTHER; note = 2'-deoxy-2'-fluorocytidine-3'-phosphate
  modified_base 15: mod_base = OTHER; note = 2'-O-methylguanosine-3'-phosphate
  modified_base 16: mod_base = OTHER; note = 2'-deoxy-2'-fluoroguanosine-3'-phosphate
  modified_base 17: mod_base = OTHER; note = 2'-O-methylcytidine-3'-phosphate
  modified_base 18: mod_base = OTHER; note = 2'-O-methyluridine-3'-phosphate
  modified_base 19: mod_base = OTHER; note = 2'-O-methyluridine-3'-phosphate
  modified_base 20: mod_base = OTHER; note = 2'-O-methylguanosine-3'-phosphate
  modified_base 21: mod_base = OTHER; note = 2'-O-methylcytidine-3'-phosphorothioate
  modified_base 22: mod_base = OTHER; note = 2'-O-methyluridine-3'-phosphorothioate
  modified_base 23: mod_base = OTHER; note = 2'-O-methylguanosine
aacgagctggagtcggcttgctg

SEQ ID NO: 1238 - RNA, 23 nt, synthetic construct
  source 1..23: mol_type = other RNA
  modified_base 1: mod_base = OTHER; note = 2'-O-methyladenosine-3'-phosphorothioate
  modified_base 2: mod_base = OTHER; note = 2'-deoxy-2'-fluoroguanosine-3'-phosphorothioate
  modified_base 3: mod_base = OTHER; note = 2'-O-methylcytidine-3'-phosphate
  modified_base 4: mod_base = OTHER; note = 2'-O-methyluridine-3'-phosphate
  modified_base 5: mod_base = OTHER; note = 2'-O-methylguanosine-3'-phosphate
  modified_base 6: mod_base = OTHER; note = 2'-deoxy-2'-fluoroadenosine-3'-phosphate
  modified_base 7: mod_base = OTHER; note = 2'-O-methyluridine-3'-phosphate
  modified_base 8: mod_base = OTHER; note = 2'-deoxy-2'-fluoroadenosine-3'-phosphate
  modified_base 9: mod_base = OTHER; note = 2'-deoxy-2'-fluorocytidine-3'-phosphate
  modified_base 10: mod_base = OTHER; note = 2'-O-methylguanosine-3'-phosphate
  modified_base 11: mod_base = OTHER; note = 2'-O-methyladenosine-3'-phosphate
  modified_base 12: mod_base = OTHER; note = 2'-O-methylguanosine-3'-phosphate
  modified_base 13: mod_base = OTHER; note = 2'-O-methylcytidine-3'-phosphate
  modified_base 14: mod_base = OTHER; note = 2'-deoxy-2'-fluorouridine-3'-phosphate
  modified_base 15: mod_base = OTHER; note = 2'-O-methylguanosine-3'-phosphate
  modified_base 16: mod_base = OTHER; note = 2'-deoxy-2'-fluoroguanosine-3'-phosphate
  modified_base 17: mod_base = OTHER; note = 2'-O-methyladenosine-3'-phosphate
  modified_base 18: mod_base = OTHER; note = 2'-O-methylguanosine-3'-phosphate
  modified_base 19: mod_base = OTHER; note = 2'-O-methyluridine-3'-phosphate
  modified_base 20: mod_base = OTHER; note = 2'-O-methylcytidine-3'-phosphate
  modified_base 21: mod_base = OTHER; note = 2'-O-methylguanosine-3'-phosphorothioate
  modified_base 22: mod_base = OTHER; note = 2'-O-methylguanosine-3'-phosphorothioate
  modified_base 23: mod_base = OTHER; note = 2'-O-methylcytidine
agctgatacgagctggagtcggc

SEQ ID NO: 1239 - RNA, 23 nt, synthetic construct
  source 1..23: mol_type = other RNA
  modified_base 1: mod_base = OTHER; note = 2'-O-methyladenosine-3'-phosphorothioate
  modified_base 2: mod_base = OTHER; note = 2'-deoxy-2'-fluoroadenosine-3'-phosphorothioate
  modified_base 3: mod_base = OTHER; note = 2'-O-methylguanosine-3'-phosphate
  modified_base 4: mod_base = OTHER; note = 2'-O-methylguanosine-3'-phosphate
  modified_base 5: mod_base = OTHER; note = 2'-O-methyluridine-3'-phosphate
  modified_base 6: mod_base = OTHER; note = 2'-deoxy-2'-fluorouridine-3'-phosphate
  modified_base 7: mod_base = OTHER; note = 2'-O-methylguanosine-3'-phosphate
  modified_base 8: mod_base = OTHER; note = 2'-deoxy-2'-fluoroadenosine-3'-phosphate
  modified_base 9: mod_base = OTHER; note = 2'-deoxy-2'-fluorouridine-3'-phosphate
  modified_base 10: mod_base = OTHER; note = 2'-O-methylguanosine-3'-phosphate
  modified_base 11: mod_base = OTHER; note = 2'-O-methylguanosine-3'-phosphate
  modified_base 12: mod_base = OTHER; note = 2'-O-methylcytidine-3'-phosphate
  modified_base 13: mod_base = OTHER; note = 2'-O-methyluridine-3'-phosphate
  modified_base 14: mod_base = OTHER; note = 2'-deoxy-2'-fluoroguanosine-3'-phosphate
  modified_base 15: mod_base = OTHER; note = 2'-O-methyladenosine-3'-phosphate
  modified_base 16: mod_base = OTHER; note = 2'-deoxy-2'-fluorouridine-3'-phosphate
  modified_base 17: mod_base = OTHER; note = 2'-O-methyladenosine-3'-phosphate
  modified_base 18: mod_base = OTHER; note = 2'-O-methylcytidine-3'-phosphate
  modified_base 19: mod_base = OTHER; note = 2'-O-methylguanosine-3'-phosphate
  modified_base 20: mod_base = OTHER; note = 2'-O-methyladenosine-3'-phosphate
  modified_base 21: mod_base = OTHER; note = 2'-O-methylguanosine-3'-phosphorothioate
  modified_base 22: mod_base = OTHER; note = 2'-O-methylcytidine-3'-phosphorothioate
  modified_base 23: mod_base = OTHER; note = 2'-O-methyluridine
aaggttgatggctgatacgagct

SEQ ID NO: 1240 - RNA, 23 nt, synthetic construct
  source 1..23: mol_type = other RNA
  modified_base 1: mod_base = OTHER; note = 2'-O-methyladenosine-3'-phosphorothioate
  modified_base 2: mod_base = OTHER; note = 2'-deoxy-2'-fluorocytidine-3'-phosphorothioate
  modified_base 3: mod_base = OTHER; note = 2'-O-methyladenosine-3'-phosphate
  modified_base 4: mod_base = OTHER; note = 2'-O-methylguanosine-3'-phosphate
  modified_base 5: mod_base = OTHER; note = 2'-O-methyluridine-3'-phosphate
  modified_base 6: mod_base = OTHER; note = 2'-deoxy-2'-fluoroguanosine-3'-phosphate
  modified_base 7: mod_base = OTHER; note = 2'-O-methylguanosine-3'-phosphate
  modified_base 8: mod_base = OTHER; note = 2'-deoxy-2'-fluoroadenosine-3'-phosphate
  modified_base 9: mod_base = OTHER; note = 2'-deoxy-2'-fluoroguanosine-3'-phosphate
  modified_base 10: mod_base = OTHER; note = 2'-O-methyladenosine-3'-phosphate
  modified_base 11: mod_base = OTHER; note = 2'-O-methylguanosine-3'-phosphate
  modified_base 12: mod_base = OTHER; note = 2'-O-methylguanosine-3'-phosphate
  modified_base 13: mod_base = OTHER; note = 2'-O-methyluridine-3'-phosphate
  modified_base 14: mod_base = OTHER; note = 2'-deoxy-2'-fluorouridine-3'-phosphate
  modified_base 15: mod_base = OTHER; note = 2'-O-methylguanosine-3'-phosphate
  modified_base 16: mod_base = OTHER; note = 2'-deoxy-2'-fluoroadenosine-3'-phosphate
  modified_base 17: mod_base = OTHER; note = 2'-O-methyluridine-3'-phosphate
  modified_base 18: mod_base = OTHER; note = 2'-O-methylguanosine-3'-phosphate
  modified_base 19: mod_base = OTHER; note = 2'-O-methylguanosine-3'-phosphate
  modified_base 20: mod_base = OTHER; note = 2'-O-methylcytidine-3'-phosphate
  modified_base 21: mod_base = OTHER; note = 2'-O-methyluridine-3'-phosphorothioate
  modified_base 22: mod_base = OTHER; note = 2'-O-methylguanosine-3'-phosphorothioate
  modified_base 23: mod_base = OTHER; note = 2'-O-methyladenosine
acagtggagaggttgatggctga

SEQ ID NO: 1241 - RNA, 23 nt, synthetic construct
  source 1..23: mol_type = other RNA
  modified_base 1: mod_base = OTHER; note = 2'-O-methyladenosine-3'-phosphorothioate
  modified_base 2: mod_base = OTHER; note = 2'-deoxy-2'-fluorocytidine-3'-phosphorothioate
  modified_base 3: mod_base = OTHER; note = 2'-O-methyluridine-3'-phosphate
  modified_base 4: mod_base = OTHER; note = 2'-O-methyluridine-3'-phosphate
  modified_base 5: mod_base = OTHER; note = 2'-O-methylguanosine-3'-phosphate
  modified_base 6: mod_base = OTHER; note = 2'-deoxy-2'-fluoroguanosine-3'-phosphate
  modified_base 7: mod_base = OTHER; note = 2'-O-methylcytidine-3'-phosphate
  modified_base 8: mod_base = OTHER; note = 2'-deoxy-2'-fluoroadenosine-3'-phosphate
  modified_base 9: mod_base = OTHER; note = 2'-deoxy-2'-fluoroguanosine-3'-phosphate
  modified_base 10: mod_base = OTHER; note = 2'-O-methyluridine-3'-phosphate
  modified_base 11: mod_base = OTHER; note = 2'-O-methylguanosine-3'-phosphate
  modified_base 12: mod_base = OTHER; note = 2'-O-methylguanosine-3'-phosphate
  modified_base 13: mod_base = OTHER; note = 2'-O-methyladenosine-3'-phosphate
  modified_base 14: mod_base = OTHER; note = 2'-deoxy-2'-fluoroguanosine-3'-phosphate
  modified_base 15: mod_base = OTHER; note = 2'-O-methyladenosine-3'-phosphate
  modified_base 16: mod_base = OTHER; note = 2'-deoxy-2'-fluoroguanosine-3'-phosphate
  modified_base 17: mod_base = OTHER; note = 2'-O-methylguanosine-3'-phosphate
  modified_base 18: mod_base = OTHER; note = 2'-O-methyluridine-3'-phosphate
  modified_base 19: mod_base = OTHER; note = 2'-O-methyluridine-3'-phosphate
  modified_base 20: mod_base = OTHER; note = 2'-O-methylguanosine-3'-phosphate
  modified_base 21: mod_base = OTHER; note = 2'-O-methyladenosine-3'-phosphorothioate
  modified_base 22: mod_base = OTHER; note = 2'-O-methyluridine-3'-phosphorothioate
  modified_base 23: mod_base = OTHER; note = 2'-O-methylguanosine
acttggcagtggagaggttgatg

SEQ ID NO: 1242 - RNA, 23 nt, synthetic construct
  source 1..23: mol_type = other RNA
  modified_base 1: mod_base = OTHER; note = 2'-O-methyladenosine-3'-phosphorothioate
  modified_base 2: mod_base = OTHER; note = 2'-deoxy-2'-fluoroguanosine-3'-phosphorothioate
  modified_base 3: mod_base = OTHER; note = 2'-O-methyladenosine-3'-phosphate
  modified_base 4: mod_base = OTHER; note = 2'-O-methyladenosine-3'-phosphate
  modified_base 5: mod_base = OTHER; note = 2'-O-methyluridine-3'-phosphate
  modified_base 6: mod_base = OTHER; note = 2'-deoxy-2'-fluorocytidine-3'-phosphate
  modified_base 7: mod_base = OTHER; note = 2'-O-methylcytidine-3'-phosphate
  modified_base 8: mod_base = OTHER; note = 2'-deoxy-2'-fluorouridine-3'-phosphate
  modified_base 9: mod_base = OTHER; note = 2'-deoxy-2'-fluorouridine-3'-phosphate
  modified_base 10: mod_base = OTHER; note = 2'-O-methylguanosine-3'-phosphate
  modified_base 11: mod_base = OTHER; note = 2'-O-methylguanosine-3'-phosphate
  modified_base 12: mod_base = OTHER; note = 2'-O-methylcytidine-3'-phosphate
  modified_base 13: mod_base = OTHER; note = 2'-O-methyladenosine-3'-phosphate
  modified_base 14: mod_base = OTHER; note = 2'-deoxy-2'-fluoroguanosine-3'-phosphate
  modified_base 15: mod_base = OTHER; note = 2'-O-methyluridine-3'-phosphate
  modified_base 16: mod_base = OTHER; note = 2'-deoxy-2'-fluoroguanosine-3'-phosphate
  modified_base 17: mod_base = OTHER; note = 2'-O-methylguanosine-3'-phosphate
  modified_base 18: mod_base = OTHER; note = 2'-O-methyladenosine-3'-phosphate
  modified_base 19: mod_base = OTHER; note = 2'-O-methylguanosine-3'-phosphate
  modified_base 20: mod_base = OTHER; note = 2'-O-methyladenosine-3'-phosphate
  modified_base 21: mod_base = OTHER; note = 2'-O-methylguanosine-3'-phosphorothioate
  modified_base 22: mod_base = OTHER; note = 2'-O-methylguanosine-3'-phosphorothioate
  modified_base 23: mod_base = OTHER; note = 2'-O-methyluridine
agaatccttggcagtggagaggt

SEQ ID NO: 1243 - RNA, 23 nt, synthetic construct
  source 1..23: mol_type = other RNA
  modified_base 1: mod_base = OTHER; note = 2'-O-methyladenosine-3'-phosphorothioate
  modified_base 2: mod_base = OTHER; note = 2'-deoxy-2'-fluorocytidine-3'-phosphorothioate
  modified_base 3: mod_base = OTHER; note = 2'-O-methylguanosine-3'-phosphate
  modified_base 4: mod_base = OTHER; note = 2'-O-methylguanosine-3'-phosphate
  modified_base 5: mod_base = OTHER; note = 2'-O-methylcytidine-3'-phosphate
  modified_base 6: mod_base = OTHER; note = 2'-deoxy-2'-fluorouridine-3'-phosphate
  modified_base 7: mod_base = OTHER; note = 2'-O-methyluridine-3'-phosphate
  modified_base 8: mod_base = OTHER; note = 2'-deoxy-2'-fluorouridine-3'-phosphate
  modified_base 9: mod_base = OTHER; note = 2'-deoxy-2'-fluoroguanosine-3'-phosphate
  modified_base 10: mod_base = OTHER; note = 2'-O-methylguanosine-3'-phosphate
  modified_base 11: mod_base = OTHER; note = 2'-O-methyladenosine-3'-phosphate
  modified_base 12: mod_base = OTHER; note = 2'-O-methyladenosine-3'-phosphate
  modified_base 13: mod_base = OTHER; note = 2'-O-methyluridine-3'-phosphate
  modified_base 14: mod_base = OTHER; note = 2'-deoxy-2'-fluorocytidine-3'-phosphate
  modified_base 15: mod_base = OTHER; note = 2'-O-methylcytidine-3'-phosphate
  modified_base 16: mod_base = OTHER; note = 2'-deoxy-2'-fluorouridine-3'-phosphate
  modified_base 17: mod_base = OTHER; note = 2'-O-methyluridine-3'-phosphate
  modified_base 18: mod_base = OTHER; note = 2'-O-methylguanosine-3'-phosphate
  modified_base 19: mod_base = OTHER; note = 2'-O-methylguanosine-3'-phosphate
  modified_base 20: mod_base = OTHER; note = 2'-O-methylcytidine-3'-phosphate
  modified_base 21: mod_base = OTHER; note = 2'-O-methyladenosine-3'-phosphorothioate
  modified_base 22: mod_base = OTHER; note = 2'-O-methylguanosine-3'-phosphorothioate
  modified_base 23: mod_base = OTHER; note = 2'-O-methyluridine
acggctttggaatccttggcagt

SEQ ID NO: 1244 - RNA, 23 nt, synthetic construct
  source 1..23: mol_type = other RNA
  modified_base 1: mod_base = OTHER; note = 2'-O-methyladenosine-3'-phosphorothioate
  modified_base 2: mod_base = OTHER; note = 2'-deoxy-2'-fluoroguanosine-3'-phosphorothioate
  modified_base 3: mod_base = OTHER; note = 2'-O-methyluridine-3'-phosphate
  modified_base 4: mod_base = OTHER; note = 2'-O-methylguanosine-3'-phosphate
  modified_base 5: mod_base = OTHER; note = 2'-O-methyladenosine-3'-phosphate
  modified_base 6: mod_base = OTHER; note = 2'-deoxy-2'-fluorocytidine-3'-phosphate
  modified_base 7: mod_base = OTHER; note = 2'-O-methylcytidine-3'-phosphate
  modified_base 8: mod_base = OTHER; note = 2'-deoxy-2'-fluoroadenosine-3'-phosphate
  modified_base 9: mod_base = OTHER; note = 2'-deoxy-2'-fluorocytidine-3'-phosphate
  modified_base 10: mod_base = OTHER; note = 2'-O-methylguanosine-3'-phosphate
  modified_base 11: mod_base = OTHER; note = 2'-O-methylguanosine-3'-phosphate
  modified_base 12: mod_base = OTHER; note = 2'-O-methylcytidine-3'-phosphate
  modified_base 13: mod_base = OTHER; note = 2'-O-methyluridine-3'-phosphate
  modified_base 14: mod_base = OTHER; note = 2'-deoxy-2'-fluorouridine-3'-phosphate
  modified_base 15: mod_base = OTHER; note = 2'-O-methyluridine-3'-phosphate
  modified_base 16: mod_base = OTHER; note = 2'-deoxy-2'-fluoroguanosine-3'-phosphate
  modified_base 17: mod_base = OTHER; note = 2'-O-methylguanosine-3'-phosphate
  modified_base 18: mod_base = OTHER; note = 2'-O-methyladenosine-3'-phosphate
  modified_base 19: mod_base = OTHER; note = 2'-O-methyladenosine-3'-phosphate
  modified_base 20: mod_base = OTHER; note = 2'-O-methyluridine-3'-phosphate
  modified_base 21: mod_base = OTHER; note = 2'-O-methylcytidine-3'-phosphorothioate
  modified_base 22: mod_base = OTHER; note = 2'-O-methylcytidine-3'-phosphorothioate
  modified_base 23: mod_base = OTHER; note = 2'-O-methyluridine
agtgaccacggctttggaatcct

SEQ ID NO: 1245 - RNA, 23 nt, synthetic construct
  source 1..23: mol_type = other RNA
  modified_base 1: mod_base = OTHER; note = 2'-O-methyladenosine-3'-phosphorothioate
  modified_base 2: mod_base = OTHER; note = 2'-deoxy-2'-fluoroadenosine-3'-phosphorothioate
  modified_base 3: mod_base = OTHER; note = 2'-O-methylcytidine-3'-phosphate
  modified_base 4: mod_base = OTHER; note = 2'-O-methyladenosine-3'-phosphate
  modified_base 5: mod_base = OTHER; note = 2'-O-methylcytidine-3'-phosphate
  modified_base 6: mod_base = OTHER; note = 2'-deoxy-2'-fluoroadenosine-3'-phosphate
  modified_base 7: mod_base = OTHER; note = 2'-O-methylguanosine-3'-phosphate
  modified_base 8: mod_base = OTHER; note = 2'-deoxy-2'-fluoroguanosine-3'-phosphate
  modified_base 9: mod_base = OTHER; note = 2'-deoxy-2'-fluorouridine-3'-phosphate
  modified_base 10: mod_base = OTHER; note = 2'-O-methylguanosine-3'-phosphate
  modified_base 11: mod_base = OTHER; note = 2'-O-methyladenosine-3'-phosphate
  modified_base 12: mod_base = OTHER; note = 2'-O-methylcytidine-3'-phosphate
  modified_base 13: mod_base = OTHER; note = 2'-O-methylcytidine-3'-phosphate
  modified_base 14: mod_base = OTHER; note = 2'-deoxy-2'-fluoroadenosine-3'-phosphate
  modified_base 15: mod_base = OTHER; note = 2'-O-methylcytidine-3'-phosphate
  modified_base 16: mod_base = OTHER; note = 2'-deoxy-2'-fluoroguanosine-3'-phosphate
  modified_base 17: mod_base = OTHER; note = 2'-O-methylguanosine-3'-phosphate
  modified_base 18: mod_base = OTHER; note = 2'-O-methylcytidine-3'-phosphate
  modified_base 19: mod_base = OTHER; note = 2'-O-methyluridine-3'-phosphate
  modified_base 20: mod_base = OTHER; note = 2'-O-methyluridine-3'-phosphate
  modified_base 21: mod_base = OTHER; note = 2'-O-methyluridine-3'-phosphorothioate
  modified_base 22: mod_base = OTHER; note = 2'-O-methylguanosine-3'-phosphorothioate
  modified_base 23: mod_base = OTHER; note = 2'-O-methylguanosine
aacacaggtgaccacggctttgg

SEQ ID NO: 1246 - RNA, 23 nt, synthetic construct
  source 1..23: mol_type = other RNA
  modified_base 1: mod_base = OTHER; note = 2'-O-methyladenosine-3'-phosphorothioate
  modified_base 2: mod_base = OTHER; note = 2'-deoxy-2'-fluoroadenosine-3'-phosphorothioate
  modified_base 3: mod_base = OTHER; note = 2'-O-methyladenosine-3'-phosphate
  modified_base 4: mod_base = OTHER; note = 2'-O-methyluridine-3'-phosphate
  modified_base 5: mod_base = OTHER; note = 2'-O-methylguanosine-3'-phosphate
  modified_base 6: mod_base = OTHER; note = 2'-deoxy-2'-fluoroadenosine-3'-phosphate
  modified_base 7: mod_base = OTHER; note = 2'-O-methyluridine-3'-phosphate
  modified_base 8: mod_base = OTHER; note = 2'-deoxy-2'-fluorocytidine-3'-phosphate
  modified_base 9: mod_base = OTHER; note = 2'-deoxy-2'-fluoroadenosine-3'-phosphate
  modified_base 10: mod_base = OTHER; note = 2'-O-methylcytidine-3'-phosphate
  modified_base 11: mod_base = OTHER; note = 2'-O-methyladenosine-3'-phosphate
  modified_base 12: mod_base = OTHER; note = 2'-O-methylcytidine-3'-phosphate
  modified_base 13: mod_base = OTHER; note = 2'-O-methyladenosine-3'-phosphate
  modified_base 14: mod_base = OTHER; note = 2'-deoxy-2'-fluoroguanosine-3'-phosphate
  modified_base 15: mod_base = OTHER; note = 2'-O-methylguanosine-3'-phosphate
  modified_base 16: mod_base = OTHER; note = 2'-deoxy-2'-fluorouridine-3'-phosphate
  modified_base 17: mod_base = OTHER; note = 2'-O-methylguanosine-3'-phosphate
  modified_base 18: mod_base = OTHER; note = 2'-O-methyladenosine-3'-phosphate
  modified_base 19: mod_base = OTHER; note = 2'-O-methylcytidine-3'-phosphate
  modified_base 20: mod_base = OTHER; note = 2'-O-methylcytidine-3'-phosphate
  modified_base 21: mod_base = OTHER; note = 2'-O-methyladenosine-3'-phosphorothioate
  modified_base 22: mod_base = OTHER; note = 2'-O-methylcytidine-3'-phosphorothioate
  modified_base 23: mod_base = OTHER; note = 2'-O-methylguanosine
aaatgatcacacaggtgaccacg

SEQ ID NO: 1247 - RNA, 23 nt, synthetic construct
  source 1..23: mol_type = other RNA
  modified_base 1: mod_base = OTHER; note = 2'-O-methyladenosine-3'-phosphorothioate
  modified_base 2: mod_base = OTHER; note = 2'-deoxy-2'-fluoroadenosine-3'-phosphorothioate
  modified_base 3: mod_base = OTHER; note = 2'-O-methylguanosine-3'-phosphate
  modified_base 4: mod_base = OTHER; note = 2'-O-methylcytidine-3'-phosphate
  modified_base 5: mod_base = OTHER; note = 2'-O-methyladenosine-3'-phosphate
  modified_base 6: mod_base = OTHER; note = 2'-deoxy-2'-fluorocytidine-3'-phosphate
  modified_base 7: mod_base = OTHER; note = 2'-O-methyladenosine-3'-phosphate
  modified_base 8: mod_base = OTHER; note = 2'-deoxy-2'-fluoroadenosine-3'-phosphate
  modified_base 9: mod_base = OTHER; note = 2'-deoxy-2'-fluorouridine-3'-phosphate
  modified_base 10: mod_base = OTHER; note = 2'-O-methylguanosine-3'-phosphate
  modified_base 11: mod_base = OTHER; note = 2'-O-methyladenosine-3'-phosphate
  modified_base 12: mod_base = OTHER; note = 2'-O-methyluridine-3'-phosphate
  modified_base 13: mod_base = OTHER; note = 2'-O-methylcytidine-3'-phosphate
  modified_base 14: mod_base = OTHER; note = 2'-deoxy-2'-fluoroadenosine-3'-phosphate
  modified_base 15: mod_base = OTHER; note = 2'-O-methylcytidine-3'-phosphate
  modified_base 16: mod_base = OTHER; note = 2'-deoxy-2'-fluoroadenosine-3'-phosphate
  modified_base 17: mod_base = OTHER; note = 2'-O-methylcytidine-3'-phosphate
  modified_base 18: mod_base = OTHER; note = 2'-O-methyladenosine-3'-phosphate
  modified_base 19: mod_base = OTHER; note = 2'-O-methylguanosine-3'-phosphate
  modified_base 20: mod_base = OTHER; note = 2'-O-methylguanosine-3'-phosphate
  modified_base 21: mod_base = OTHER; note = 2'-O-methyluridine-3'-phosphorothioate
  modified_base 22: mod_base = OTHER; note = 2'-O-methylguanosine-3'-phosphorothioate
  modified_base 23: mod_base = OTHER; note = 2'-O-methyladenosine
aagcacaatgatcacacaggtga

SEQ ID NO: 1248 - RNA, 23 nt, synthetic construct
  source 1..23: mol_type = other RNA
  modified_base 1: mod_base = OTHER; note = 2'-O-methyladenosine-3'-phosphorothioate
  modified_base 2: mod_base = OTHER; note = 2'-deoxy-2'-fluoroadenosine-3'-phosphorothioate
  modified_base 3: mod_base = OTHER; note = 2'-O-methylcytidine-3'-phosphate
  modified_base 4: mod_base = OTHER; note = 2'-O-methyluridine-3'-phosphate
  modified_base 5: mod_base = OTHER; note = 2'-O-methylguanosine-3'-phosphate
  modified_base 6: mod_base = OTHER; note = 2'-deoxy-2'-fluoroadenosine-3'-phosphate
  modified_base 7: mod_base = OTHER; note = 2'-O-methylcytidine-3'-phosphate
  modified_base 8: mod_base = OTHER; note = 2'-deoxy-2'-fluoroadenosine-3'-phosphate
  modified_base 9: mod_base = OTHER; note = 2'-deoxy-2'-fluoroguanosine-3'-phosphate
  modified_base 10: mod_base = OTHER; note = 2'-O-methylcytidine-3'-phosphate
  modified_base 11: mod_base = OTHER; note = 2'-O-methyladenosine-3'-phosphate
  modified_base 12: mod_base = OTHER; note = 2'-O-methylcytidine-3'-phosphate
  modified_base 13: mod_base = OTHER; note = 2'-O-methyladenosine-3'-phosphate
  modified_base 14: mod_base = OTHER; note = 2'-deoxy-2'-fluoroadenosine-3'-phosphate
  modified_base 15: mod_base = OTHER; note = 2'-O-methyluridine-3'-phosphate
  modified_base 16: mod_base = OTHER; note = 2'-deoxy-2'-fluoroguanosine-3'-phosphate
  modified_base 17: mod_base = OTHER; note = 2'-O-methyladenosine-3'-phosphate
  modified_base 18: mod_base = OTHER; note = 2'-O-methyluridine-3'-phosphate
  modified_base 19: mod_base = OTHER; note = 2'-O-methylcytidine-3'-phosphate
  modified_base 20: mod_base = OTHER; note = 2'-O-methyladenosine-3'-phosphate
  modified_base 21: mod_base = OTHER; note = 2'-O-methylcytidine-3'-phosphorothioate
  modified_base 22: mod_base = OTHER; note = 2'-O-methyladenosine-3'-phosphorothioate
  modified_base 23: mod_base = OTHER; note = 2'-O-methylcytidine
aactgacagcacaatgatcacac

SEQ ID NO: 1249 - RNA, 23 nt, synthetic construct
  source 1..23: mol_type = other RNA
  modified_base 1: mod_base = OTHER; note = 2'-O-methyladenosine-3'-phosphorothioate
  modified_base 2: mod_base = OTHER; note = 2'-deoxy-2'-fluorocytidine-3'-phosphorothioate
  modified_base 3: mod_base = OTHER; note = 2'-O-methyladenosine-3'-phosphate
  modified_base 4: mod_base = OTHER; note = 2'-O-methylcytidine-3'-phosphate
  modified_base 5: mod_base = OTHER; note = 2'-O-methyladenosine-3'-phosphate
  modified_base 6: mod_base = OTHER; note = 2'-deoxy-2'-fluorocytidine-3'-phosphate
  modified_base 7: mod_base = OTHER; note = 2'-O-methylcytidine-3'-phosphate
  modified_base 8: mod_base = OTHER; note = 2'-deoxy-2'-fluoroadenosine-3'-phosphate
  modified_base 9: mod_base = OTHER; note = 2'-deoxy-2'-fluoroguanosine-3'-phosphate
  modified_base 10: mod_base = OTHER; note = 2'-O-methylguanosine-3'-phosphate
  modified_base 11: mod_base = OTHER; note = 2'-O-methyladenosine-3'-phosphate
  modified_base 12: mod_base = OTHER; note = 2'-O-methylcytidine-3'-phosphate
  modified_base 13: mod_base = OTHER; note = 2'-O-methyluridine-3'-phosphate
  modified_base 14: mod_base = OTHER; note = 2'-deoxy-2'-fluoroguanosine-3'-phosphate
  modified_base 15: mod_base = OTHER; note = 2'-O-methyladenosine-3'-phosphate
  modified_base 16: mod_base = OTHER; note = 2'-deoxy-2'-fluorocytidine-3'-phosphate
  modified_base 17: mod_base = OTHER; note = 2'-O-methyladenosine-3'-phosphate
  modified_base 18: mod_base = OTHER; note = 2'-O-methylguanosine-3'-phosphate
  modified_base 19: mod_base = OTHER; note = 2'-O-methylcytidine-3'-phosphate
  modified_base 20: mod_base = OTHER; note = 2'-O-methyladenosine-3'-phosphate
  modified_base 21: mod_base = OTHER; note = 2'-O-methylcytidine-3'-phosphorothioate
  modified_base 22: mod_base = OTHER; note = 2'-O-methyladenosine-3'-phosphorothioate
  modified_base 23: mod_base = OTHER; note = 2'-O-methyladenosine
acacaccaggactgacagcacaa

SEQ ID NO: 1250 - RNA, 23 nt, synthetic construct
  source 1..23: mol_type = other RNA
  modified_base 1: mod_base = OTHER; note = 2'-O-methyladenosine-3'-phosphorothioate
  modified_base 2: mod_base = OTHER; note = 2'-deoxy-2'-fluoroadenosine-3'-phosphorothioate
  modified_base 3: mod_base = OTHER; note = 2'-O-methylguanosine-3'-phosphate
  modified_base 4: mod_base = OTHER; note = 2'-O-methyladenosine-3'-phosphate
  modified_base 5: mod_base = OTHER; note = 2'-O-methylcytidine-3'-phosphate
  modified_base 6: mod_base = OTHER; note = 2'-deoxy-2'-fluoroadenosine-3'-phosphate
  modified_base 7: mod_base = OTHER; note = 2'-O-methylguanosine-3'-phosphate
  modified_base 8: mod_base = OTHER; note = 2'-deoxy-2'-fluorocytidine-3'-phosphate
  modified_base 9: mod_base = OTHER; note = 2'-deoxy-2'-fluoroadenosine-3'-phosphate
  modified_base 10: mod_base = OTHER; note = 2'-O-methylcytidine-3'-phosphate
  modified_base 11: mod_base = OTHER; note = 2'-O-methyladenosine-3'-phosphate
  modified_base 12: mod_base = OTHER; note = 2'-O-methylcytidine-3'-phosphate
  modified_base 13: mod_base = OTHER; note = 2'-O-methylcytidine-3'-phosphate
  modified_base 14: mod_base = OTHER; note = 2'-deoxy-2'-fluoroadenosine-3'-phosphate
  modified_base 15: mod_base = OTHER; note = 2'-O-methylguanosine-3'-phosphate
  modified_base 16: mod_base = OTHER; note = 2'-deoxy-2'-fluoroguanosine-3'-phosphate
  modified_base 17: mod_base = OTHER; note = 2'-O-methyladenosine-3'-phosphate
  modified_base 18: mod_base = OTHER; note = 2'-O-methylcytidine-3'-phosphate
  modified_base 19: mod_base = OTHER; note = 2'-O-methyluridine-3'-phosphate
  modified_base 20: mod_base = OTHER; note = 2'-O-methylguanosine-3'-phosphate
  modified_base 21: mod_base = OTHER; note = 2'-O-methyladenosine-3'-phosphorothioate
  modified_base 22: mod_base = OTHER; note = 2'-O-methylcytidine-3'-phosphorothioate
  modified_base 23: mod_base = OTHER; note = 2'-O-methyladenosine
aagacagcacaccaggactgaca

SEQ ID NO: 1251 - RNA, 23 nt, synthetic construct
  source 1..23: mol_type = other RNA
  modified_base 1: mod_base = OTHER; note = 2'-O-methyladenosine-3'-phosphorothioate
  modified_base 2: mod_base = OTHER; note = 2'-deoxy-2'-fluoroadenosine-3'-phosphorothioate
  modified_base 3: mod_base = OTHER; note = 2'-O-methylguanosine-3'-phosphate
  modified_base 4: mod_base = OTHER; note = 2'-O-methyluridine-3'-phosphate
  modified_base 5: mod_base = OTHER; note = 2'-O-methylguanosine-3'-phosphate
  modified_base 6: mod_base = OTHER; note = 2'-deoxy-2'-fluoroguanosine-3'-phosphate
  modified_base 7: mod_base = OTHER; note = 2'-O-methyladenosine-3'-phosphate
  modified_base 8: mod_base = OTHER; note = 2'-deoxy-2'-fluoroadenosine-3'-phosphate
  modified_base 9: mod_base = OTHER; note = 2'-deoxy-2'-fluoroguanosine-3'-phosphate
  modified_base 10: mod_base = OTHER; note = 2'-O-methyladenosine-3'-phosphate
  modified_base 11: mod_base = OTHER; note = 2'-O-methylcytidine-3'-phosphate
  modified_base 12: mod_base = OTHER; note = 2'-O-methyladenosine-3'-phosphate
  modified_base 13: mod_base = OTHER; note = 2'-O-methylguanosine-3'-phosphate
  modified_base 14: mod_base = OTHER; note = 2'-deoxy-2'-fluorocytidine-3'-phosphate
  modified_base 15: mod_base = OTHER; note = 2'-O-methyladenosine-3'-phosphate
  modified_base 16: mod_base = OTHER; note = 2'-deoxy-2'-fluorocytidine-3'-phosphate
  modified_base 17: mod_base = OTHER; note = 2'-O-methyladenosine-3'-phosphate
  modified_base 18: mod_base = OTHER; note = 2'-O-methylcytidine-3'-phosphate
  modified_base 19: mod_base = OTHER; note = 2'-O-methylcytidine-3'-phosphate
  modified_base 20: mod_base = OTHER; note = 2'-O-methyladenosine-3'-phosphate
  modified_base 21: mod_base = OTHER; note = 2'-O-methylguanosine-3'-phosphorothioate
  modified_base 22: mod_base = OTHER; note = 2'-O-methylguanosine-3'-phosphorothioate
  modified_base 23: mod_base = OTHER; note = 2'-O-methyladenosine
aagtggaagacagcacaccagga

SEQ ID NO: 1252 - RNA, 23 nt, synthetic construct
  source 1..23: mol_type = other RNA
  modified_base 1: mod_base = OTHER; note = 2'-O-methyladenosine-3'-phosphorothioate
  modified_base 2: mod_base = OTHER; note = 2'-deoxy-2'-fluoroadenosine-3'-phosphorothioate
  modified_base 3: mod_base = OTHER; note = 2'-O-methyladenosine-3'-phosphate
  modified_base 4: mod_base = OTHER; note = 2'-O-methylcytidine-3'-phosphate
  modified_base 5: mod_base = OTHER; note = 2'-O-methylcytidine-3'-phosphate
  modified_base 6: mod_base = OTHER; note = 2'-deoxy-2'-fluoroadenosine-3'-phosphate
  modified_base 7: mod_base = OTHER; note = 2'-O-methylcytidine-3'-phosphate
  modified_base 8: mod_base = OTHER; note = 2'-deoxy-2'-fluorocytidine-3'-phosphate
  modified_base 9: mod_base = OTHER; note = 2'-deoxy-2'-fluorouridine-3'-phosphate
  modified_base 10: mod_base = OTHER; note = 2'-O-methylguanosine-3'-phosphate
  modified_base 11: mod_base = OTHER; note = 2'-O-methyluridine-3'-phosphate
  modified_base 12: mod_base = OTHER; note = 2'-O-methyladenosine-3'-phosphate
  modified_base 13: mod_base = OTHER; note = 2'-O-methylcytidine-3'-phosphate
  modified_base 14: mod_base = OTHER; note = 2'-deoxy-2'-fluorocytidine-3'-phosphate
  modified_base 15: mod_base = OTHER; note = 2'-O-methyladenosine-3'-phosphate
  modified_base 16: mod_base = OTHER; note = 2'-deoxy-2'-fluoroadenosine-3'-phosphate
  modified_base 17: mod_base = OTHER; note = 2'-O-methylguanosine-3'-phosphate
  modified_base 18: mod_base = OTHER; note = 2'-O-methylguanosine-3'-phosphate
  modified_base 19: mod_base = OTHER; note = 2'-O-methyladenosine-3'-phosphate
  modified_base 20: mod_base = OTHER; note = 2'-O-methyladenosine-3'-phosphate
  modified_base 21: mod_base = OTHER; note = 2'-O-methyladenosine-3'-phosphorothioate
  modified_base 22: mod_base = OTHER; note = 2'-O-methyluridine-3'-phosphorothioate
  modified_base 23: mod_base = OTHER; note = 2'-O-methylcytidine
aaaccacctgtaccaaggaaatc

SEQ ID NO: 1253 - RNA, 23 nt, synthetic construct
  source 1..23: mol_type = other RNA
  modified_base 1: mod_base = OTHER; note = 2'-O-methyladenosine-3'-phosphorothioate
  modified_base 2: mod_base = OTHER; note = 2'-deoxy-2'-fluoroguanosine-3'-phosphorothioate
  modified_base 3: mod_base = OTHER; note = 2'-O-methyladenosine-3'-phosphate
  modified_base 4: mod_base = OTHER; note = 2'-O-methylguanosine-3'-phosphate
  modified_base 5: mod_base = OTHER; note = 2'-O-methyladenosine-3'-phosphate
  modified_base 6: mod_base = OTHER; note = 2'-deoxy-2'-fluoroguanosine-3'-phosphate
  modified_base 7: mod_base = OTHER; note = 2'-O-methyladenosine-3'-phosphate
  modified_base 8: mod_base = OTHER; note = 2'-deoxy-2'-fluoroadenosine-3'-phosphate
  modified_base 9: mod_base = OTHER; note = 2'-deoxy-2'-fluorocytidine-3'-phosphate
  modified_base 10: mod_base = OTHER; note = 2'-O-methylcytidine-3'-phosphate
  modified_base 11: mod_base = OTHER; note = 2'-O-methyladenosine-3'-phosphate
  modified_base 12: mod_base = OTHER; note = 2'-O-methylcytidine-3'-phosphate
  modified_base 13: mod_base = OTHER; note = 2'-O-methylcytidine-3'-phosphate
  modified_base 14: mod_base = OTHER; note = 2'-deoxy-2'-fluorouridine-3'-phosphate
  modified_base 15: mod_base = OTHER; note = 2'-O-methylguanosine-3'-phosphate
  modified_base 16: mod_base = OTHER; note = 2'-deoxy-2'-fluorouridine-3'-phosphate
  modified_base 17: mod_base = OTHER; note = 2'-O-methyladenosine-3'-phosphate
  modified_base 18: mod_base = OTHER; note = 2'-O-methylcytidine-3'-phosphate
  modified_base 19: mod_base = OTHER; note = 2'-O-methylcytidine-3'-phosphate
  modified_base 20: mod_base = OTHER; note = 2'-O-methyladenosine-3'-phosphate
  modified_base 21: mod_base = OTHER; note = 2'-O-methyladenosine-3'-phosphorothioate
  modified_base 22: mod_base = OTHER; note = 2'-O-methylguanosine-3'-phosphorothioate
  modified_base 23: mod_base = OTHER; note = 2'-O-methylguanosine
agagagaaccacctgtaccaagg

SEQ ID NO: 1254 - RNA, 23 nt, synthetic construct
  source 1..23: mol_type = other RNA
  modified_base 1: mod_base = OTHER; note = 2'-O-methyladenosine-3'-phosphorothioate
  modified_base 2: mod_base = OTHER; note = 2'-deoxy-2'-fluorocytidine-3'-phosphorothioate
  modified_base 3: mod_base = OTHER; note = 2'-O-methylcytidine-3'-phosphate
  modified_base 4: mod_base = OTHER; note = 2'-O-methyladenosine-3'-phosphate
  modified_base 5: mod_base = OTHER; note = 2'-O-methyluridine-3'-phosphate
  modified_base 6: mod_base = OTHER; note = 2'-deoxy-2'-fluorouridine-3'-phosphate
  modified_base 7: mod_base = OTHER; note = 2'-O-methylguanosine-3'-phosphate
  modified_base 8: mod_base = OTHER; note = 2'-deoxy-2'-fluorocytidine-3'-phosphate
  modified_base 9: mod_base = OTHER; note = 2'-deoxy-2'-fluorouridine-3'-phosphate
  modified_base 10: mod_base = OTHER; note = 2'-O-methylguanosine-3'-phosphate
  modified_base 11: mod_base = OTHER; note = 2'-O-methylguanosine-3'-phosphate
  modified_base 12: mod_base = OTHER; note = 2'-O-methyladenosine-3'-phosphate
  modified_base 13: mod_base = OTHER; note = 2'-O-methylguanosine-3'-phosphate
  modified_base 14: mod_base = OTHER; note = 2'-deoxy-2'-fluoroadenosine-3'-phosphate
  modified_base 15: mod_base = OTHER; note = 2'-O-methylguanosine-3'-phosphate
  modified_base 16: mod_base = OTHER; note = 2'-deoxy-2'-fluoroadenosine-3'-phosphate
  modified_base 17: mod_base = OTHER; note = 2'-O-methyladenosine-3'-phosphate
  modified_base 18: mod_base = OTHER; note = 2'-O-methylcytidine-3'-phosphate
  modified_base 19: mod_base = OTHER; note = 2'-O-methylcytidine-3'-phosphate
  modified_base 20: mod_base = OTHER; note = 2'-O-methyladenosine-3'-phosphate
  modified_base 21: mod_base = OTHER; note = 2'-O-methylcytidine-3'-phosphorothioate
  modified_base 22: mod_base = OTHER; note = 2'-O-methylcytidine-3'-phosphorothioate
  modified_base 23: mod_base = OTHER; note = 2'-O-methyluridine
accattgctggagagaaccacct

SEQ ID NO: 1255 - RNA, 23 nt, synthetic construct
  source 1..23: mol_type = other RNA
  modified_base 1: mod_base = OTHER; note = 2'-O-methyladenosine-3'-phosphorothioate
  modified_base 2: mod_base = OTHER; note = 2'-deoxy-2'-fluoroguanosine-3'-phosphorothioate
  modified_base 3: mod_base = OTHER; note = 2'-O-methyladenosine-3'-phosphate
  modified_base 4: mod_base = OTHER; note = 2'-O-methyladenosine-3'-phosphate
  modified_base 5: mod_base = OTHER; note = 2'-O-methylguanosine-3'-phosphate
  modified_base 6: mod_base = OTHER; note = 2'-deoxy-2'-fluorocytidine-3'-phosphate
  modified_base 7: mod_base = OTHER; note = 2'-O-methyluridine-3'-phosphate
  modified_base 8: mod_base = OTHER; note = 2'-deoxy-2'-fluorocytidine-3'-phosphate
  modified_base 9: mod_base = OTHER; note = 2'-deoxy-2'-fluorocytidine-3'-phosphate
  modified_base 10: mod_base = OTHER; note = 2'-O-methylcytidine-3'-phosphate
  modified_base 11: mod_base = OTHER; note = 2'-O-methyladenosine-3'-phosphate
  modified_base 12: mod_base = OTHER; note = 2'-O-methyluridine-3'-phosphate
  modified_base 13: mod_base = OTHER; note = 2'-O-methyluridine-3'-phosphate
  modified_base 14: mod_base = OTHER; note = 2'-deoxy-2'-fluoroguanosine-3'-phosphate
  modified_base 15: mod_base = OTHER; note = 2'-O-methylcytidine-3'-phosphate
  modified_base 16: mod_base = OTHER; note = 2'-deoxy-2'-fluorouridine-3'-phosphate
  modified_base 17: mod_base = OTHER; note = 2'-O-methylguanosine-3'-phosphate
  modified_base 18: mod_base = OTHER; note = 2'-O-methylguanosine-3'-phosphate
  modified_base 19: mod_base = OTHER; note = 2'-O-methyladenosine-3'-phosphate
  modified_base 20: mod_base = OTHER; note = 2'-O-methylguanosine-3'-phosphate
  modified_base 21: mod_base = OTHER; note = 2'-O-methyladenosine-3'-phosphorothioate
  modified_base 22: mod_base = OTHER; note = 2'-O-methylguanosine-3'-phosphorothioate
  modified_base 23: mod_base = OTHER; note = 2'-O-methyladenosine
agaagctcccattgctggagaga

SEQ ID NO: 1256 - RNA, 23 nt, synthetic construct
  source 1..23: mol_type = other RNA
  modified_base 1: mod_base = OTHER; note = 2'-O-methyladenosine-3'-phosphorothioate
  modified_base 2: mod_base = OTHER; note = 2'-deoxy-2'-fluorouridine-3'-phosphorothioate
  modified_base 3: mod_base = OTHER; note = 2'-O-methyladenosine-3'-phosphate
  modified_base 4: mod_base = OTHER; note = 2'-O-methyladenosine-3'-phosphate
  modified_base 5: mod_base = OTHER; note = 2'-O-methyladenosine-3'-phosphate
  modified_base 6: mod_base = OTHER; note = 2'-deoxy-2'-fluoroguanosine-3'-phosphate
  modified_base 7: mod_base = OTHER; note = 2'-O-methyladenosine-3'-phosphate
  modified_base 8: mod_base = OTHER; note = 2'-deoxy-2'-fluoroadenosine-3'-phosphate
  modified_base 9: mod_base = OTHER; note = 2'-deoxy-2'-fluorouridine-3'-phosphate
  modified_base 10: mod_base = OTHER; note = 2'-O-methylguanosine-3'-phosphate
  modified_base 11: mod_base = OTHER; note = 2'-O-methyladenosine-3'-phosphate
  modified_base 12: mod_base = OTHER; note = 2'-O-methyladenosine-3'-phosphate
  modified_base 13: mod_base = OTHER; note = 2'-O-methylguanosine-3'-phosphate
  modified_base 14: mod_base = OTHER; note = 2'-deoxy-2'-fluorocytidine-3'-phosphate
  modified_base 15: mod_base = OTHER; note = 2'-O-methyluridine-3'-phosphate
  modified_base 16: mod_base = OTHER; note = 2'-deoxy-2'-fluorocytidine-3'-phosphate
  modified_base 17: mod_base = OTHER; note = 2'-O-methylcytidine-3'-phosphate
  modified_base 18: mod_base = OTHER; note = 2'-O-methylcytidine-3'-phosphate
  modified_base 19: mod_base = OTHER; note = 2'-O-methyladenosine-3'-phosphate
  modified_base 20: mod_base = OTHER; note = 2'-O-methyluridine-3'-phosphate
  modified_base 21: mod_base = OTHER; note = 2'-O-methyluridine-3'-phosphorothioate
  modified_base 22: mod_base = OTHER; note = 2'-O-methylguanosine-3'-phosphorothioate
  modified_base 23: mod_base = OTHER; note = 2'-O-methylcytidine
ataaagaatgaagctcccattgc

SEQ ID NO: 1257 - RNA, 23 nt, synthetic construct
  source 1..23: mol_type = other RNA
  modified_base 1: mod_base = OTHER; note = 2'-O-methyladenosine-3'-phosphorothioate
  modified_base 2: mod_base = OTHER; note = 2'-deoxy-2'-fluorouridine-3'-phosphorothioate
  modified_base 3: mod_base = OTHER; note = 2'-O-methylcytidine-3'-phosphate
  modified_base 4: mod_base = OTHER; note = 2'-O-methyladenosine-3'-phosphate
  modified_base 5: mod_base = OTHER; note = 2'-O-methyladenosine-3'-phosphate
  modified_base 6: mod_base = OTHER; note = 2'-deoxy-2'-fluoroadenosine-3'-phosphate
  modified_base 7: mod_base = OTHER; note = 2'-O-methylcytidine-3'-phosphate
  modified_base 8: mod_base = OTHER; note = 2'-deoxy-2'-fluorouridine-3'-phosphate
  modified_base 9: mod_base = OTHER; note = 2'-deoxy-2'-fluoroguanosine-3'-phosphate
  modified_base 10: mod_base = OTHER; note = 2'-O-methylguanosine-3'-phosphate
  modified_base 11: mod_base = OTHER; note = 2'-O-methyluridine-3'-phosphate
  modified_base 12: mod_base = OTHER; note = 2'-O-methyladenosine-3'-phosphate
  modified_base 13: mod_base = OTHER; note = 2'-O-methyladenosine-3'-phosphate
  modified_base 14: mod_base = OTHER; note = 2'-deoxy-2'-fluoroadenosine-3'-phosphate
  modified_base 15: mod_base = OTHER; note = 2'-O-methylguanosine-3'-phosphate
  modified_base 16: mod_base = OTHER; note = 2'-deoxy-2'-fluoroadenosine-3'-phosphate
  modified_base 17: mod_base = OTHER; note = 2'-O-methyladenosine-3'-phosphate
  modified_base 18: mod_base = OTHER; note = 2'-O-methyluridine-3'-phosphate
  modified_base 19: mod_base = OTHER; note = 2'-O-methylguanosine-3'-phosphate
  modified_base 20: mod_base = OTHER; note = 2'-O-methyladenosine-3'-phosphate
  modified_base 21: mod_base = OTHER; note = 2'-O-methyladenosine-3'-phosphorothioate
  modified_base 22: mod_base = OTHER; note = 2'-O-methylguanosine-3'-phosphorothioate
  modified_base 23: mod_base = OTHER; note = 2'-O-methylcytidine
atcaaactggtaaagaatgaagc

SEQ ID NO: 1258 - RNA, 23 nt, synthetic construct
  source 1..23: mol_type = other RNA
  modified_base 1: mod_base = OTHER; note = 2'-O-methyladenosine-3'-phosphorothioate
  modified_base 2: mod_base = OTHER; note = 2'-deoxy-2'-fluoroadenosine-3'-phosphorothioate
  modified_base 3: mod_base = OTHER; note = 2'-O-methyladenosine-3'-phosphate
  modified_base 4: mod_base = OTHER; note = 2'-O-methylcytidine-3'-phosphate
  modified_base 5: mod_base = OTHER; note = 2'-O-methyladenosine-3'-phosphate
  modified_base 6: mod_base = OTHER; note = 2'-deoxy-2'-fluoroadenosine-3'-phosphate
  modified_base 7: mod_base = OTHER; note = 2'-O-methyluridine-3'-phosphate
  modified_base 8: mod_base = OTHER; note = 2'-deoxy-2'-fluorouridine-3'-phosphate
  modified_base 9: mod_base = OTHER; note = 2'-deoxy-2'-fluorocytidine-3'-phosphate
  modified_base 10: mod_base = OTHER; note = 2'-O-methyladenosine-3'-phosphate
  modified_base 11: mod_base = OTHER; note = 2'-O-methyladenosine-3'-phosphate
  modified_base 12: mod_base = OTHER; note = 2'-O-methyladenosine-3'-phosphate
  modified_base 13: mod_base = OTHER; note = 2'-O-methylcytidine-3'-phosphate
  modified_base 14: mod_base = OTHER; note = 2'-deoxy-2'-fluorouridine-3'-phosphate
  modified_base 15: mod_base = OTHER; note = 2'-O-methylguanosine-3'-phosphate
  modified_base 16: mod_base = OTHER; note = 2'-deoxy-2'-fluoroguanosine-3'-phosphate
  modified_base 17: mod_base = OTHER; note = 2'-O-methyluridine-3'-phosphate
  modified_base 18: mod_base = OTHER; note = 2'-O-methyladenosine-3'-phosphate
  modified_base 19: mod_base = OTHER; note = 2'-O-methyladenosine-3'-phosphate
  modified_base 20: mod_base = OTHER; note = 2'-O-methyladenosine-3'-phosphate
  modified_base 21: mod_base = OTHER; note = 2'-O-methylguanosine-3'-phosphorothioate
  modified_base 22: mod_base = OTHER; note = 2'-O-methyladenosine-3'-phosphorothioate
  modified_base 23: mod_base = OTHER; note = 2'-O-methyladenosine
aaacaattcaaactggtaaagaa

SEQ ID NO: 1259 - RNA, 23 nt, synthetic construct
  source 1..23: mol_type = other RNA
  modified_base 1: mod_base = OTHER; note = 2'-O-methyladenosine-3'-phosphorothioate
  modified_base 2: mod_base = OTHER; note = 2'-deoxy-2'-fluoroadenosine-3'-phosphorothioate
  modified_base 3: mod_base = OTHER; note = 2'-O-methyladenosine-3'-phosphate
  modified_base 4: mod_base = OTHER; note = 2'-O-methyluridine-3'-phosphate
  modified_base 5: mod_base = OTHER; note = 2'-O-methylcytidine-3'-phosphate
  modified_base 6: mod_base = OTHER; note = 2'-deoxy-2'-fluorocytidine-3'-phosphate
  modified_base 7: mod_base = OTHER; note = 2'-O-methyladenosine-3'-phosphate
  modified_base 8: mod_base = OTHER; note = 2'-deoxy-2'-fluoroadenosine-3'-phosphate
  modified_base 9: mod_base = OTHER; note = 2'-deoxy-2'-fluoroadenosine-3'-phosphate
  modified_base 10: mod_base = OTHER; note = 2'-O-methylcytidine-3'-phosphate
  modified_base 11: mod_base = OTHER; note = 2'-O-methyladenosine-3'-phosphate
  modified_base 12: mod_base = OTHER; note = 2'-O-methyladenosine-3'-phosphate
  modified_base 13: mod_base = OTHER; note = 2'-O-methyluridine-3'-phosphate
  modified_base 14: mod_base = OTHER; note = 2'-deoxy-2'-fluorouridine-3'-phosphate
  modified_base 15: mod_base = OTHER; note = 2'-O-methylcytidine-3'-phosphate
  modified_base 16: mod_base = OTHER; note = 2'-deoxy-2'-fluoroadenosine-3'-phosphate
  modified_base 17: mod_base = OTHER; note = 2'-O-methyladenosine-3'-phosphate
  modified_base 18: mod_base = OTHER; note = 2'-O-methyladenosine-3'-phosphate
  modified_base 19: mod_base = OTHER; note = 2'-O-methylcytidine-3'-phosphate
  modified_base 20: mod_base = OTHER; note = 2'-O-methyluridine-3'-phosphate
  modified_base 21: mod_base = OTHER; note = 2'-O-methylguanosine-3'-phosphorothioate
  modified_base 22: mod_base = OTHER; note = 2'-O-methylguanosine-3'-phosphorothioate
  modified_base 23: mod_base = OTHER; note = 2'-O-methyluridine
aaatccaaacaattcaaactggt

SEQ ID NO: 1260 - RNA, 23 nt, synthetic construct
  source 1..23: mol_type = other RNA
  modified_base 1: mod_base = OTHER; note = 2'-O-methyladenosine-3'-phosphorothioate
  modified_base 2: mod_base = OTHER; note = 2'-deoxy-2'-fluoroadenosine-3'-phosphorothioate
  modified_base 3: mod_base = OTHER; note = 2'-O-methyladenosine-3'-phosphate
  modified_base 4: mod_base = OTHER; note = 2'-O-methylguanosine-3'-phosphate
  modified_base 5: mod_base = OTHER; note = 2'-O-methyladenosine-3'-phosphate
  modified_base 6: mod_base = OTHER; note = 2'-deoxy-2'-fluoroguanosine-3'-phosphate
  modified_base 7: mod_base = OTHER; note = 2'-O-methyluridine-3'-phosphate
  modified_base 8: mod_base = OTHER; note = 2'-deoxy-2'-fluoroadenosine-3'-phosphate
  modified_base 9: mod_base = OTHER; note = 2'-deoxy-2'-fluoroadenosine-3'-phosphate
  modified_base 10: mod_base = OTHER; note = 2'-O-methyladenosine-3'-phosphate
  modified_base 11: mod_base = OTHER; note = 2'-O-methyluridine-3'-phosphate
  modified_base 12: mod_base = OTHER; note = 2'-O-methylcytidine-3'-phosphate
  modified_base 13: mod_base = OTHER; note = 2'-O-methylcytidine-3'-phosphate
  modified_base 14: mod_base = OTHER; note = 2'-deoxy-2'-fluoroadenosine-3'-phosphate
  modified_base 15: mod_base = OTHER; note = 2'-O-methyladenosine-3'-phosphate
  modified_base 16: mod_base = OTHER; note = 2'-deoxy-2'-fluoroadenosine-3'-phosphate
  modified_base 17: mod_base = OTHER; note = 2'-O-methylcytidine-3'-phosphate
  modified_base 18: mod_base = OTHER; note = 2'-O-methyladenosine-3'-phosphate
  modified_base 19: mod_base = OTHER; note = 2'-O-methyladenosine-3'-phosphate
  modified_base 20: mod_base = OTHER; note = 2'-O-methyluridine-3'-phosphate
  modified_base 21: mod_base = OTHER; note = 2'-O-methyluridine-3'-phosphorothioate
  modified_base 22: mod_base = OTHER; note = 2'-O-methylcytidine-3'-phosphorothioate
  modified_base 23: mod_base = OTHER; note = 2'-O-methyladenosine
aaagagtaaatccaaacaattca

SEQ ID NO: 1261 - RNA, 23 nt, synthetic construct
  source 1..23: mol_type = other RNA
  modified_base 1: mod_base = OTHER; note = 2'-O-methyladenosine-3'-phosphorothioate
  modified_base 2: mod_base = OTHER; note = 2'-deoxy-2'-fluorocytidine-3'-phosphorothioate
  modified_base 3: mod_base = OTHER; note = 2'-O-methyluridine-3'-phosphate
  modified_base 4: mod_base = OTHER; note = 2'-O-methylguanosine-3'-phosphate
  modified_base 5: mod_base = OTHER; note = 2'-O-methyladenosine-3'-phosphate
  modified_base 6: mod_base = OTHER; note = 2'-deoxy-2'-fluorocytidine-3'-phosphate
  modified_base 7: mod_base = OTHER; note = 2'-O-methyluridine-3'-phosphate
  modified_base 8: mod_base = OTHER; note = 2'-deoxy-2'-fluorouridine-3'-phosphate
  modified_base 9: mod_base = OTHER; note = 2'-deoxy-2'-fluoroguanosine-3'-phosphate
  modified_base 10: mod_base = OTHER; note = 2'-O-methyladenosine-3'-phosphate
  modified_base 11: mod_base = OTHER; note = 2'-O-methyladenosine-3'-phosphate
  modified_base 12: mod_base = OTHER; note = 2'-O-methyladenosine-3'-phosphate
  modified_base 13: mod_base = OTHER; note = 2'-O-methyladenosine-3'-phosphate
  modified_base 14: mod_base = OTHER; note = 2'-deoxy-2'-fluoroadenosine-3'-phosphate
  modified_base 15: mod_base = OTHER; note = 2'-O-methyluridine-3'-phosphate
  modified_base 16: mod_base = OTHER; note = 2'-deoxy-2'-fluoroadenosine-3'-phosphate
  modified_base 17: mod_base = OTHER; note = 2'-O-methyluridine-3'-phosphate
  modified_base 18: mod_base = OTHER; note = 2'-O-methyladenosine-3'-phosphate
  modified_base 19: mod_base = OTHER; note = 2'-O-methyladenosine-3'-phosphate
  modified_base 20: mod_base = OTHER; note = 2'-O-methylguanosine-3'-phosphate
  modified_base 21: mod_base = OTHER; note = 2'-O-methyladenosine-3'-phosphorothioate
  modified_base 22: mod_base = OTHER; note = 2'-O-methylguanosine-3'-phosphorothioate
  modified_base 23: mod_base = OTHER; note = 2'-O-methyluridine
actgacttgaaaaatataagagt

SEQ ID NO: 1262 - RNA, 23 nt, synthetic construct
  source 1..23: mol_type = other RNA
  modified_base 1: mod_base = OTHER; note = 2'-O-methyladenosine-3'-phosphorothioate
  modified_base 2: mod_base = OTHER; note = 2'-deoxy-2'-fluoroguanosine-3'-phosphorothioate
  modified_base 3: mod_base = OTHER; note = 2'-O-methylguanosine-3'-phosphate
  modified_base 4: mod_base = OTHER; note = 2'-O-methyluridine-3'-phosphate
  modified_base 5: mod_base = OTHER; note = 2'-O-methyluridine-3'-phosphate
  modified_base 6: mod_base = OTHER; note = 2'-deoxy-2'-fluorouridine-3'-phosphate
  modified_base 7: mod_base = OTHER; note = 2'-O-methyladenosine-3'-phosphate
  modified_base 8: mod_base = OTHER; note = 2'-deoxy-2'-fluoroadenosine-3'-phosphate
  modified_base 9: mod_base = OTHER; note = 2'-deoxy-2'-fluorouridine-3'-phosphate
  modified_base 10: mod_base = OTHER; note = 2'-O-methylcytidine-3'-phosphate
  modified_base 11: mod_base = OTHER; note = 2'-O-methylcytidine-3'-phosphate
  modified_base 12: mod_base = OTHER; note = 2'-O-methyluridine-3'-phosphate
  modified_base 13: mod_base = OTHER; note = 2'-O-methylguanosine-3'-phosphate
  modified_base 14: mod_base = OTHER; note = 2'-deoxy-2'-fluoroadenosine-3'-phosphate
  modified_base 15: mod_base = OTHER; note = 2'-O-methylcytidine-3'-phosphate
  modified_base 16: mod_base = OTHER; note = 2'-deoxy-2'-fluorouridine-3'-phosphate
  modified_base 17: mod_base = OTHER; note = 2'-O-methyluridine-3'-phosphate
  modified_base 18: mod_base = OTHER; note = 2'-O-methylguanosine-3'-phosphate
  modified_base 19: mod_base = OTHER; note = 2'-O-methyladenosine-3'-phosphate
  modified_base 20: mod_base = OTHER; note = 2'-O-methyladenosine-3'-phosphate
  modified_base 21: mod_base = OTHER; note = 2'-O-methyladenosine-3'-phosphorothioate
  modified_base 22: mod_base = OTHER; note = 2'-O-methyladenosine-3'-phosphorothioate
  modified_base 23: mod_base = OTHER; note = 2'-O-methyladenosine
aggtttaatcctgacttgaaaaa

SEQ ID NO: 1263 - RNA, 23 nt, synthetic construct
  source 1..23: mol_type = other RNA
  modified_base 1: mod_base = OTHER; note = 2'-O-methyladenosine-3'-phosphorothioate
  modified_base 2: mod_base = OTHER; note = 2'-deoxy-2'-fluorouridine-3'-phosphorothioate
  modified_base 3: mod_base = OTHER; note = 2'-O-methyladenosine-3'-phosphate
  modified_base 4: mod_base = OTHER; note = 2'-O-methyladenosine-3'-phosphate
  modified_base 5: mod_base = OTHER; note = 2'-O-methyladenosine-3'-phosphate
  modified_base 6: mod_base = OTHER; note = 2'-deoxy-2'-fluoroadenosine-3'-phosphate
  modified_base 7: mod_base = OTHER; note = 2'-O-methylguanosine-3'-phosphate
  modified_base 8: mod_base = OTHER; note = 2'-deoxy-2'-fluoroguanosine-3'-phosphate
  modified_base 9: mod_base = OTHER; note = 2'-deoxy-2'-fluoroguanosine-3'-phosphate
  modified_base 10: mod_base = OTHER; note = 2'-O-methyluridine-3'-phosphate
  modified_base 11: mod_base = OTHER; note = 2'-O-methyluridine-3'-phosphate
  modified_base 12: mod_base = OTHER; note = 2'-O-methyluridine-3'-phosphate
  modified_base 13: mod_base = OTHER; note = 2'-O-methyladenosine-3'-phosphate
  modified_base 14: mod_base = OTHER; note = 2'-deoxy-2'-fluoroadenosine-3'-phosphate
  modified_base 15: mod_base = OTHER; note = 2'-O-methyluridine-3'-phosphate
  modified_base 16: mod_base = OTHER; note = 2'-deoxy-2'-fluorocytidine-3'-phosphate
  modified_base 17: mod_base = OTHER; note = 2'-O-methylcytidine-3'-phosphate
  modified_base 18: mod_base = OTHER; note = 2'-O-methyluridine-3'-phosphate
  modified_base 19: mod_base = OTHER; note = 2'-O-methylguanosine-3'-phosphate
  modified_base 20: mod_base = OTHER; note = 2'-O-methyladenosine-3'-phosphate
  modified_base 21: mod_base = OTHER; note = 2'-O-methylcytidine-3'-phosphorothioate
  modified_base 22: mod_base = OTHER; note = 2'-O-methyluridine-3'-phosphorothioate
  modified_base 23: mod_base = OTHER; note = 2'-O-methyluridine
ataaaagggtttaatcctgactt

SEQ ID NO: 1264 - RNA, 23 nt, synthetic construct
  source 1..23: mol_type = other RNA
  modified_base 1: mod_base = OTHER; note = 2'-O-methyladenosine-3'-phosphorothioate
  modified_base 2: mod_base = OTHER; note = 2'-deoxy-2'-fluorocytidine-3'-phosphorothioate
  modified_base 3: mod_base = OTHER; note = 2'-O-methylguanosine-3'-phosphate
  modified_base 4: mod_base = OTHER; note = 2'-O-methyladenosine-3'-phosphate
  modified_base 5: mod_base = OTHER; note = 2'-O-methylguanosine-3'-phosphate
  modified_base 6: mod_base = OTHER; note = 2'-deoxy-2'-fluoroadenosine-3'-phosphate
  modified_base 7: mod_base = OTHER; note = 2'-O-methyladenosine-3'-phosphate
  modified_base 8: mod_base = OTHER; note = 2'-deoxy-2'-fluorouridine-3'-phosphate
  modified_base 9: mod_base = OTHER; note = 2'-deoxy-2'-fluoroadenosine-3'-phosphate
  modified_base 10: mod_base = OTHER; note = 2'-O-methyluridine-3'-phosphate
  modified_base 11: mod_base = OTHER; note = 2'-O-methyladenosine-3'-phosphate
  modified_base 12: mod_base = OTHER; note = 2'-O-methyluridine-3'-phosphate
  modified_base 13: mod_base = OTHER; note = 2'-O-methyladenosine-3'-phosphate
  modified_base 14: mod_base = OTHER; note = 2'-deoxy-2'-fluoroadenosine-3'-phosphate
  modified_base 15: mod_base = OTHER; note = 2'-O-methyladenosine-3'-phosphate
  modified_base 16: mod_base = OTHER; note = 2'-deoxy-2'-fluoroadenosine-3'-phosphate
  modified_base 17: mod_base = OTHER; note = 2'-O-methylguanosine-3'-phosphate
  modified_base 18: mod_base = OTHER; note = 2'-O-methylguanosine-3'-phosphate
  modified_base 19: mod_base = OTHER; note = 2'-O-methylguanosine-3'-phosphate
  modified_base 20: mod_base = OTHER; note = 2'-O-methyluridine-3'-phosphate
  modified_base 21: mod_base = OTHER; note = 2'-O-methyluridine-3'-phosphorothioate
  modified_base 22: mod_base = OTHER; note = 2'-O-methyluridine-3'-phosphorothioate
  modified_base 23: mod_base = OTHER; note = 2'-O-methyladenosine
acgagaatatataaaagggttta

SEQ ID NO: 1265 - RNA, 23 nt, synthetic construct
  source 1..23: mol_type = other RNA
  modified_base 1: mod_base = OTHER; note = 2'-O-methyladenosine-3'-phosphorothioate
  modified_base 2: mod_base = OTHER; note = 2'-deoxy-2'-fluorouridine-3'-phosphorothioate
  modified_base 3: mod_base = OTHER; note = 2'-O-methylguanosine-3'-phosphate
  modified_base 4: mod_base = OTHER; note = 2'-O-methyluridine-3'-phosphate
  modified_base 5: mod_base = OTHER; note = 2'-O-methyluridine-3'-phosphate
  modified_base 6: mod_base = OTHER; note = 2'-deoxy-2'-fluorocytidine-3'-phosphate
  modified_base 7: mod_base = OTHER; note = 2'-O-methylcytidine-3'-phosphate
  modified_base 8: mod_base = OTHER; note = 2'-deoxy-2'-fluoroguanosine-3'-phosphate
  modified_base 9: mod_base = OTHER; note = 2'-deoxy-2'-fluoroadenosine-3'-phosphate
  modified_base 10: mod_base = OTHER; note = 2'-O-methylguanosine-3'-phosphate
  modified_base 11: mod_base = OTHER; note = 2'-O-methyladenosine-3'-phosphate
  modified_base 12: mod_base = OTHER; note = 2'-O-methyladenosine-3'-phosphate
  modified_base 13: mod_base = OTHER; note = 2'-O-methyluridine-3'-phosphate
  modified_base 14: mod_base = OTHER; note = 2'-deoxy-2'-fluoroadenosine-3'-phosphate
  modified_base 15: mod_base = OTHER; note = 2'-O-methyluridine-3'-phosphate
  modified_base 16: mod_base = OTHER; note = 2'-deoxy-2'-fluoroadenosine-3'-phosphate
  modified_base 17: mod_base = OTHER; note = 2'-O-methyluridine-3'-phosphate
  modified_base 18: mod_base = OTHER; note = 2'-O-methyladenosine-3'-phosphate
  modified_base 19: mod_base = OTHER; note = 2'-O-methyladenosine-3'-phosphate
  modified_base 20: mod_base = OTHER; note = 2'-O-methyladenosine-3'-phosphate
  modified_base 21: mod_base = OTHER; note = 2'-O-methyladenosine-3'-phosphorothioate
  modified_base 22: mod_base = OTHER; note = 2'-O-methylguanosine-3'-phosphorothioate
  modified_base 23: mod_base = OTHER; note = 2'-O-methylguanosine
atgttccgagaatatataaaagg

SEQ ID NO: 1266 - RNA, 23 nt, synthetic construct
  source 1..23: mol_type = other RNA
  modified_base 1: mod_base = OTHER; note = 2'-O-methyladenosine-3'-phosphorothioate
  modified_base 2: mod_base = OTHER; note = 2'-deoxy-2'-fluorouridine-3'-phosphorothioate
  modified_base 3: mod_base = OTHER; note = 2'-O-methylguanosine-3'-phosphate
  modified_base 4: mod_base = OTHER; note = 2'-O-methylcytidine-3'-phosphate
  modified_base 5: mod_base = OTHER; note = 2'-O-methyladenosine-3'-phosphate
  modified_base 6: mod_base = OTHER; note = 2'-deoxy-2'-fluorocytidine-3'-phosphate
  modified_base 7: mod_base = OTHER; note = 2'-O-methyluridine-3'-phosphate
  modified_base 8: mod_base = OTHER; note = 2'-deoxy-2'-fluoroguanosine-3'-phosphate
  modified_base 9: mod_base = OTHER; note = 2'-deoxy-2'-fluorouridine-3'-phosphate
  modified_base 10: mod_base = OTHER; note = 2'-O-methyluridine-3'-phosphate
  modified_base 11: mod_base = OTHER; note = 2'-O-methylcytidine-3'-phosphate
  modified_base 12: mod_base = OTHER; note = 2'-O-methylcytidine-3'-phosphate
  modified_base 13: mod_base = OTHER; note = 2'-O-methylguanosine-3'-phosphate
  modified_base 14: mod_base = OTHER; note = 2'-deoxy-2'-fluoroadenosine-3'-phosphate
  modified_base 15: mod_base = OTHER; note = 2'-O-methylguanosine-3'-phosphate
  modified_base 16: mod_base = OTHER; note = 2'-deoxy-2'-fluoroadenosine-3'-phosphate
  modified_base 17: mod_base = OTHER; note = 2'-O-methyladenosine-3'-phosphate
  modified_base 18: mod_base = OTHER; note = 2'-O-methyluridine-3'-phosphate
  modified_base 19: mod_base = OTHER; note = 2'-O-methyladenosine-3'-phosphate
  modified_base 20: mod_base = OTHER; note = 2'-O-methyluridine-3'-phosphate
  modified_base 21: mod_base = OTHER; note = 2'-O-methyladenosine-3'-phosphorothioate
  modified_base 22: mod_base = OTHER; note = 2'-O-methyluridine-3'-phosphorothioate
  modified_base 23: mod_base = OTHER; note = 2'-O-methyladenosine
atgcactgttccgagaatatata

SEQ ID NO: 1267 - RNA, 23 nt, synthetic construct
  source 1..23: mol_type = other RNA
  modified_base 1: mod_base = OTHER; note = 2'-O-methyladenosine-3'-phosphorothioate
  modified_base 2: mod_base = OTHER; note = 2'-deoxy-2'-fluoroadenosine-3'-phosphorothioate
  modified_base 3: mod_base = OTHER; note = 2'-O-methylguanosine-3'-phosphate
  modified_base 4: mod_base = OTHER; note = 2'-O-methylcytidine-3'-phosphate
  modified_base 5: mod_base = OTHER; note = 2'-O-methylcytidine-3'-phosphate
  modified_base 6: mod_base = OTHER; note = 2'-deoxy-2'-fluorocytidine-3'-phosphate
  modified_base 7: mod_base = OTHER; note = 2'-O-methyluridine-3'-phosphate
  modified_base 8: mod_base = OTHER; note = 2'-deoxy-2'-fluoroguanosine-3'-phosphate
  modified_base 9: mod_base = OTHER; note = 2'-deoxy-2'-fluorocytidine-3'-phosphate
  modified_base 10: mod_base = OTHER; note = 2'-O-methyladenosine-3'-phosphate
  modified_base 11: mod_base = OTHER; note = 2'-O-methylcytidine-3'-phosphate
  modified_base 12: mod_base = OTHER; note = 2'-O-methyluridine-3'-phosphate
  modified_base 13: mod_base = OTHER; note = 2'-O-methylguanosine-3'-phosphate
  modified_base 14: mod_base = OTHER; note = 2'-deoxy-2'-fluorouridine-3'-phosphate
  modified_base 15: mod_base = OTHER; note = 2'-O-methyluridine-3'-phosphate
  modified_base 16: mod_base = OTHER; note = 2'-deoxy-2'-fluorocytidine-3'-phosphate
  modified_base 17: mod_base = OTHER; note = 2'-O-methylcytidine-3'-phosphate
  modified_base 18: mod_base = OTHER; note = 2'-O-methylguanosine-3'-phosphate
  modified_base 19: mod_base = OTHER; note = 2'-O-methyladenosine-3'-phosphate
  modified_base 20: mod_base = OTHER; note = 2'-O-methylguanosine-3'-phosphate
  modified_base 21: mod_base = OTHER; note = 2'-O-methyladenosine-3'-phosphorothioate
  modified_base 22: mod_base = OTHER; note = 2'-O-methyladenosine-3'-phosphorothioate
  modified_base 23: mod_base = OTHER; note = 2'-O-methyluridine
aagccctgcactgttccgagaat

SEQ ID NO: 1268 - RNA, 23 nt, synthetic construct
  source 1..23: mol_type = other RNA
  modified_base 1: mod_base = OTHER; note = 2'-O-methyladenosine-3'-phosphorothioate
  modified_base 2: mod_base = OTHER; note = 2'-deoxy-2'-fluoroadenosine-3'-phosphorothioate
  modified_base 3: mod_base = OTHER; note = 2'-O-methylcytidine-3'-phosphate
  modified_base 4: mod_base = OTHER; note = 2'-O-methyluridine-3'-phosphate
  modified_base 5: mod_base = OTHER; note = 2'-O-methyluridine-3'-phosphate
  modified_base 6: mod_base = OTHER; note = 2'-deoxy-2'-fluorouridine-3'-phosphate
  modified_base 7: mod_base = OTHER; note = 2'-O-methylcytidine-3'-phosphate
  modified_base 8: mod_base = OTHER; note = 2'-deoxy-2'-fluorocytidine-3'-phosphate
  modified_base 9: mod_base = OTHER; note = 2'-deoxy-2'-fluorouridine-3'-phosphate
  modified_base 10: mod_base = OTHER; note = 2'-O-methyluridine-3'-phosphate
  modified_base 11: mod_base = OTHER; note = 2'-O-methylcytidine-3'-phosphate
  modified_base 12: mod_base = OTHER; note = 2'-O-methyluridine-3'-phosphate
  modified_base 13: mod_base = OTHER; note = 2'-O-methylcytidine-3'-phosphate
  modified_base 14: mod_base = OTHER; note = 2'-deoxy-2'-fluoroadenosine-3'-phosphate
  modified_base 15: mod_base = OTHER; note = 2'-O-methylguanosine-3'-phosphate
  modified_base 16: mod_base = OTHER; note = 2'-deoxy-2'-fluorocytidine-3'-phosphate
  modified_base 17: mod_base = OTHER; note = 2'-O-methylcytidine-3'-phosphate
  modified_base 18: mod_base = OTHER; note = 2'-O-methylcytidine-3'-phosphate
  modified_base 19: mod_base = OTHER; note = 2'-O-methyluridine-3'-phosphate
  modified_base 20: mod_base = OTHER; note = 2'-O-methylguanosine-3'-phosphate
  modified_base 21: mod_base = OTHER; note = 2'-O-methylcytidine-3'-phosphorothioate
  modified_base 22: mod_base = OTHER; note = 2'-O-methyladenosine-3'-phosphorothioate
  modified_base 23: mod_base = OTHER; note = 2'-O-methylcytidine
aactttccttctcagccctgcac

SEQ ID NO: 1269 - RNA, 23 nt, synthetic construct
  source 1..23: mol_type = other RNA
  modified_base 1: mod_base = OTHER; note = 2'-O-methyladenosine-3'-phosphorothioate
  modified_base 2: mod_base = OTHER; note = 2'-deoxy-2'-fluoroadenosine-3'-phosphorothioate
  modified_base 3: mod_base = OTHER; note = 2'-O-methylguanosine-3'-phosphate
  modified_base 4: mod_base = OTHER; note = 2'-O-methyladenosine-3'-phosphate
  modified_base 5: mod_base = OTHER; note = 2'-O-methylguanosine-3'-phosphate
  modified_base 6: mod_base = OTHER; note = 2'-deoxy-2'-fluorocytidine-3'-phosphate
  modified_base 7: mod_base = OTHER; note = 2'-O-methyladenosine-3'-phosphate
  modified_base 8: mod_base = OTHER; note = 2'-deoxy-2'-fluorocytidine-3'-phosphate
  modified_base 9: mod_base = OTHER; note = 2'-deoxy-2'-fluorouridine-3'-phosphate
  modified_base 10: mod_base = OTHER; note = 2'-O-methyluridine-3'-phosphate
  modified_base 11: mod_base = OTHER; note = 2'-O-methyluridine-3'-phosphate
  modified_base 12: mod_base = OTHER; note = 2'-O-methylcytidine-3'-phosphate
  modified_base 13: mod_base = OTHER; note = 2'-O-methylcytidine-3'-phosphate
  modified_base 14: mod_base = OTHER; note = 2'-deoxy-2'-fluorouridine-3'-phosphate
  modified_base 15: mod_base = OTHER; note = 2'-O-methyluridine-3'-phosphate
  modified_base 16: mod_base = OTHER; note = 2'-deoxy-2'-fluorocytidine-3'-phosphate
  modified_base 17: mod_base = OTHER; note = 2'-O-methyluridine-3'-phosphate
  modified_base 18: mod_base = OTHER; note = 2'-O-methylcytidine-3'-phosphate
  modified_base 19: mod_base = OTHER; note = 2'-O-methyladenosine-3'-phosphate
  modified_base 20: mod_base = OTHER; note = 2'-O-methylguanosine-3'-phosphate
  modified_base 21: mod_base = OTHER; note = 2'-O-methylcytidine-3'-phosphorothioate
  modified_base 22: mod_base = OTHER; note = 2'-O-methylcytidine-3'-phosphorothioate
  modified_base 23: mod_base = OTHER; note = 2'-O-methylcytidine
aagagcactttccttctcagccc

SEQ ID NO: 1270 - RNA, 23 nt, synthetic construct
  source 1..23: mol_type = other RNA
  modified_base 1: mod_base = OTHER; note = 2'-O-methyladenosine-3'-phosphorothioate
  modified_base 2: mod_base = OTHER; note = 2'-deoxy-2'-fluoroguanosine-3'-phosphorothioate
  modified_base 3: mod_base = OTHER; note = 2'-O-methylcytidine-3'-phosphate
  modified_base 4: mod_base = OTHER; note = 2'-O-methyladenosine-3'-phosphate
  modified_base 5: mod_base = OTHER; note = 2'-O-methylcytidine-3'-phosphate
  modified_base 6: mod_base = OTHER; note = 2'-deoxy-2'-fluorocytidine-3'-phosphate
  modified_base 7: mod_base = OTHER; note = 2'-O-methyladenosine-3'-phosphate
  modified_base 8: mod_base = OTHER; note = 2'-deoxy-2'-fluoroguanosine-3'-phosphate
  modified_base 9: mod_base = OTHER; note = 2'-deoxy-2'-fluoroadenosine-3'-phosphate
  modified_base 10: mod_base = OTHER; note = 2'-O-methylguanosine-3'-phosphate
  modified_base 11: mod_base = OTHER; note = 2'-O-methylcytidine-3'-phosphate
  modified_base 12: mod_base = OTHER; note = 2'-O-methyladenosine-3'-phosphate
  modified_base 13: mod_base = OTHER; note = 2'-O-methylcytidine-3'-phosphate
  modified_base 14: mod_base = OTHER; note = 2'-deoxy-2'-fluorouridine-3'-phosphate
  modified_base 15: mod_base = OTHER; note = 2'-O-methyluridine-3'-phosphate
  modified_base 16: mod_base = OTHER; note = 2'-deoxy-2'-fluorouridine-3'-phosphate
  modified_base 17: mod_base = OTHER; note = 2'-O-methylcytidine-3'-phosphate
  modified_base 18: mod_base = OTHER; note = 2'-O-methylcytidine-3'-phosphate
  modified_base 19: mod_base = OTHER; note = 2'-O-methyluridine-3'-phosphate
  modified_base 20: mod_base = OTHER; note = 2'-O-methyluridine-3'-phosphate
  modified_base 21: mod_base = OTHER; note = 2'-O-methylcytidine-3'-phosphorothioate
  modified_base 22: mod_base = OTHER; note = 2'-O-methyluridine-3'-phosphorothioate
  modified_base 23: mod_base = OTHER; note = 2'-O-methylcytidine
agcaccagagcactttccttctc

SEQ ID NO: 1271 - RNA, 23 nt, synthetic construct
  source 1..23: mol_type = other RNA
  modified_base 1: mod_base = OTHER; note = 2'-O-methyladenosine-3'-phosphorothioate
  modified_base 2: mod_base = OTHER; note = 2'-deoxy-2'-fluorocytidine-3'-phosphorothioate
  modified_base 3: mod_base = OTHER; note = 2'-O-methyluridine-3'-phosphate
  modified_base 4: mod_base = OTHER; note = 2'-O-methyladenosine-3'-phosphate
  modified_base 5: mod_base = OTHER; note = 2'-O-methyluridine-3'-phosphate
  modified_base 6: mod_base = OTHER; note = 2'-deoxy-2'-fluoroguanosine-3'-phosphate
  modified_base 7: mod_base = OTHER; note = 2'-O-methyluridine-3'-phosphate
  modified_base 8: mod_base = OTHER; note = 2'-deoxy-2'-fluoroadenosine-3'-phosphate
  modified_base 9: mod_base = OTHER; note = 2'-deoxy-2'-fluorouridine-3'-phosphate
  modified_base 10: mod_base = OTHER; note = 2'-O-methyluridine-3'-phosphate
  modified_base 11: mod_base = OTHER; note = 2'-O-methylguanosine-3'-phosphate
  modified_base 12: mod_base = OTHER; note = 2'-O-methylguanosine-3'-phosphate
  modified_base 13: mod_base = OTHER; note = 2'-O-methyladenosine-3'-phosphate
  modified_base 14: mod_base = OTHER; note = 2'-deoxy-2'-fluoroguanosine-3'-phosphate
  modified_base 15: mod_base = OTHER; note = 2'-O-methylguanosine-3'-phosphate
  modified_base 16: mod_base = OTHER; note = 2'-deoxy-2'-fluorocytidine-3'-phosphate
  modified_base 17: mod_base = OTHER; note = 2'-O-methyladenosine-3'-phosphate
  modified_base 18: mod_base = OTHER; note = 2'-O-methylcytidine-3'-phosphate
  modified_base 19: mod_base = OTHER; note = 2'-O-methylcytidine-3'-phosphate
  modified_base 20: mod_base = OTHER; note = 2'-O-methyladenosine-3'-phosphate
  modified_base 21: mod_base = OTHER; note = 2'-O-methylguanosine-3'-phosphorothioate
  modified_base 22: mod_base = OTHER; note = 2'-O-methyladenosine-3'-phosphorothioate
  modified_base 23: mod_base = OTHER; note = 2'-O-methylguanosine
actatgtattggaggcaccagag

SEQ ID NO: 1272 - RNA, 23 nt, synthetic construct
  source 1..23: mol_type = other RNA
  modified_base 1: mod_base = OTHER; note = 2'-O-methyladenosine-3'-phosphorothioate
  modified_base 2: mod_base = OTHER; note = 2'-deoxy-2'-fluorocytidine-3'-phosphorothioate
  modified_base 3: mod_base = OTHER; note = 2'-O-methylcytidine-3'-phosphate
  modified_base 4: mod_base = OTHER; note = 2'-O-methyladenosine-3'-phosphate
  modified_base 5: mod_base = OTHER; note = 2'-O-methylguanosine-3'-phosphate
  modified_base 6: mod_base = OTHER; note = 2'-deoxy-2'-fluoroguanosine-3'-phosphate
  modified_base 7: mod_base = OTHER; note = 2'-O-methylcytidine-3'-phosphate
  modified_base 8: mod_base = OTHER; note = 2'-deoxy-2'-fluorocytidine-3'-phosphate
  modified_base 9: mod_base = OTHER; note = 2'-deoxy-2'-fluorouridine-3'-phosphate
  modified_base 10: mod_base = OTHER; note = 2'-O-methyladenosine-3'-phosphate
  modified_base 11: mod_base = OTHER; note = 2'-O-methyluridine-3'-phosphate
  modified_base 12: mod_base = OTHER; note = 2'-O-methylguanosine-3'-phosphate
  modified_base 13: mod_base = OTHER; note = 2'-O-methyluridine-3'-phosphate
  modified_base 14: mod_base = OTHER; note = 2'-deoxy-2'-fluoroadenosine-3'-phosphate
  modified_base 15: mod_base = OTHER; note = 2'-O-methyluridine-3'-phosphate
  modified_base 16: mod_base = OTHER; note = 2'-deoxy-2'-fluorouridine-3'-phosphate
  modified_base 17: mod_base = OTHER; note = 2'-O-methylguanosine-3'-phosphate
  modified_base 18: mod_base = OTHER; note = 2'-O-methylguanosine-3'-phosphate
  modified_base 19: mod_base = OTHER; note = 2'-O-methyladenosine-3'-phosphate
  modified_base 20: mod_base = OTHER; note = 2'-O-methylguanosine-3'-phosphate
  modified_base 21: mod_base = OTHER; note = 2'-O-methylguanosine-3'-phosphorothioate
  modified_base 22: mod_base = OTHER; note = 2'-O-methylcytidine-3'-phosphorothioate
  modified_base 23: mod_base = OTHER; note = 2'-O-methyladenosine
accaggcctatgtattggaggca

SEQ ID NO: 1273 - RNA, 23 nt, synthetic construct
  source 1..23: mol_type = other RNA
  modified_base 1: mod_base = OTHER; note = 2'-O-methyladenosine-3'-phosphorothioate
  modified_base 2: mod_base = OTHER; note = 2'-deoxy-2'-fluoroadenosine-3'-phosphorothioate
  modified_base 3: mod_base = OTHER; note = 2'-O-methyladenosine-3'-phosphate
  modified_base 4: mod_base = OTHER; note = 2'-O-methyladenosine-3'-phosphate
  modified_base 5: mod_base = OTHER; note = 2'-O-methyladenosine-3'-phosphate
  modified_base 6: mod_base = OTHER; note = 2'-deoxy-2'-fluorocytidine-3'-phosphate
  modified_base 7: mod_base = OTHER; note = 2'-O-methylcytidine-3'-phosphate
  modified_base 8: mod_base = OTHER; note = 2'-deoxy-2'-fluorocytidine-3'-phosphate
  modified_base 9: mod_base = OTHER; note = 2'-deoxy-2'-fluoroadenosine-3'-phosphate
  modified_base 10: mod_base = OTHER; note = 2'-O-methylguanosine-3'-phosphate
  modified_base 11: mod_base = OTHER; note = 2'-O-methylguanosine-3'-phosphate
  modified_base 12: mod_base = OTHER; note = 2'-O-methylcytidine-3'-phosphate
  modified_base 13: mod_base = OTHER; note = 2'-O-methylcytidine-3'-phosphate
  modified_base 14: mod_base = OTHER; note = 2'-deoxy-2'-fluorouridine-3'-phosphate
  modified_base 15: mod_base = OTHER; note = 2'-O-methyladenosine-3'-phosphate
  modified_base 16: mod_base = OTHER; note = 2'-deoxy-2'-fluorouridine-3'-phosphate
  modified_base 17: mod_base = OTHER; note = 2'-O-methylguanosine-3'-phosphate
  modified_base 18: mod_base = OTHER; note = 2'-O-methyluridine-3'-phosphate
  modified_base 19: mod_base = OTHER; note = 2'-O-methyladenosine-3'-phosphate
  modified_base 20: mod_base = OTHER; note = 2'-O-methyluridine-3'-phosphate
  modified_base 21: mod_base = OTHER; note = 2'-O-methyluridine-3'-phosphorothioate
  modified_base 22: mod_base = OTHER; note = 2'-O-methylguanosine-3'-phosphorothioate
  modified_base 23: mod_base = OTHER; note = 2'-O-methylguanosine
aaaaacccaggcctatgtattgg

SEQ ID NO: 1274 - RNA, 23 nt, synthetic construct
  source 1..23: mol_type = other RNA
  modified_base 1: mod_base = OTHER; note = 2'-O-methyladenosine-3'-phosphorothioate
  modified_base 2: mod_base = OTHER; note = 2'-deoxy-2'-fluorouridine-3'-phosphorothioate
  modified_base 3: mod_base = OTHER; note = 2'-O-methylcytidine-3'-phosphate
  modified_base 4: mod_base = OTHER; note = 2'-O-methyluridine-3'-phosphate
  modified_base 5: mod_base = OTHER; note = 2'-O-methyluridine-3'-phosphate
  modified_base 6: mod_base = OTHER; note = 2'-deoxy-2'-fluorouridine-3'-phosphate
  modified_base 7: mod_base = OTHER; note = 2'-O-methyluridine-3'-phosphate
  modified_base 8: mod_base = OTHER; note = 2'-deoxy-2'-fluoroguanosine-3'-phosphate
  modified_base 9: mod_base = OTHER; note = 2'-deoxy-2'-fluorouridine-3'-phosphate
  modified_base 10: mod_base = OTHER; note = 2'-O-methyluridine-3'-phosphate
  modified_base 11: mod_base = OTHER; note = 2'-O-methyluridine-3'-phosphate
  modified_base 12: mod_base = OTHER; note = 2'-O-methylguanosine-3'-phosphate
  modified_base 13: mod_base = OTHER; note = 2'-O-methylcytidine-3'-phosphate
  modified_base 14: mod_base = OTHER; note = 2'-deoxy-2'-fluoroadenosine-3'-phosphate
  modified_base 15: mod_base = OTHER; note = 2'-O-methylguanosine-3'-phosphate
  modified_base 16: mod_base = OTHER; note = 2'-deoxy-2'-fluorocytidine-3'-phosphate
  modified_base 17: mod_base = OTHER; note = 2'-O-methyladenosine-3'-phosphate
  modified_base 18: mod_base = OTHER; note = 2'-O-methylguanosine-3'-phosphate
  modified_base 19: mod_base = OTHER; note = 2'-O-methyladenosine-3'-phosphate
  modified_base 20: mod_base = OTHER; note = 2'-O-methyladenosine-3'-phosphate
  modified_base 21: mod_base = OTHER; note = 2'-O-methyladenosine-3'-phosphorothioate
  modified_base 22: mod_base = OTHER; note = 2'-O-methyladenosine-3'-phosphorothioate
  modified_base 23: mod_base = OTHER; note = 2'-O-methyladenosine
atcttttgtttgcagcagaaaaa

SEQ ID NO: 1275 - RNA, 23 nt, synthetic construct
  source 1..23: mol_type = other RNA
  modified_base 1: mod_base = OTHER; note = 2'-O-methyladenosine-3'-phosphorothioate
  modified_base 2: mod_base = OTHER; note = 2'-deoxy-2'-fluoroadenosine-3'-phosphorothioate
  modified_base 3: mod_base = OTHER; note = 2'-O-methylguanosine-3'-phosphate
  modified_base 4: mod_base = OTHER; note = 2'-O-methyluridine-3'-phosphate
  modified_base 5: mod_base = OTHER; note = 2'-O-methylcytidine-3'-phosphate
  modified_base 6: mod_base = OTHER; note = 2'-deoxy-2'-fluoroguanosine-3'-phosphate
  modified_base 7: mod_base = OTHER; note = 2'-O-methyladenosine-3'-phosphate
  modified_base 8: mod_base = OTHER; note = 2'-deoxy-2'-fluoroguanosine-3'-phosphate
  modified_base 9: mod_base = OTHER; note = 2'-deoxy-2'-fluorouridine-3'-phosphate
  modified_base 10: mod_base = OTHER; note = 2'-O-methylcytidine-3'-phosphate
  modified_base 11: mod_base = OTHER; note = 2'-O-methyluridine-3'-phosphate
  modified_base 12: mod_base = OTHER; note = 2'-O-methyluridine-3'-phosphate
  modified_base 13: mod_base = OTHER; note = 2'-O-methyluridine-3'-phosphate
  modified_base 14: mod_base = OTHER; note = 2'-deoxy-2'-fluorouridine-3'-phosphate
  modified_base 15: mod_base = OTHER; note = 2'-O-methylguanosine-3'-phosphate
  modified_base 16: mod_base = OTHER; note = 2'-deoxy-2'-fluorouridine-3'-phosphate
  modified_base 17: mod_base = OTHER; note = 2'-O-methyluridine-3'-phosphate
  modified_base 18: mod_base = OTHER; note = 2'-O-methyluridine-3'-phosphate
  modified_base 19: mod_base = OTHER; note = 2'-O-methylguanosine-3'-phosphate
  modified_base 20: mod_base = OTHER; note = 2'-O-methylcytidine-3'-phosphate
  modified_base 21: mod_base = OTHER; note = 2'-O-methyladenosine-3'-phosphorothioate
  modified_base 22: mod_base = OTHER; note = 2'-O-methylguanosine-3'-phosphorothioate
  modified_base 23: mod_base = OTHER; note = 2'-O-methylcytidine
aagtcgagtcttttgtttgcagc

SEQ ID NO: 1276 - RNA, 23 nt, synthetic construct
  source 1..23: mol_type = other RNA
  modified_base 1: mod_base = OTHER; note = 2'-O-methyladenosine-3'-phosphorothioate
  modified_base 2: mod_base = OTHER; note = 2'-deoxy-2'-fluorocytidine-3'-phosphorothioate
  modified_base 3: mod_base = OTHER; note = 2'-O-methyluridine-3'-phosphate
  modified_base 4: mod_base = OTHER; note = 2'-O-methylcytidine-3'-phosphate
  modified_base 5: mod_base = OTHER; note = 2'-O-methylguanosine-3'-phosphate
  modified_base 6: mod_base = OTHER; note = 2'-deoxy-2'-fluoroadenosine-3'-phosphate
  modified_base 7: mod_base = OTHER; note = 2'-O-methyladenosine-3'-phosphate
  modified_base 8: mod_base = OTHER; note = 2'-deoxy-2'-fluoroguanosine-3'-phosphate
  modified_base 9: mod_base = OTHER; note = 2'-deoxy-2'-fluorouridine-3'-phosphate
  modified_base 10: mod_base = OTHER; note = 2'-O-methylcytidine-3'-phosphate
  modified_base 11: mod_base = OTHER; note = 2'-O-methylguanosine-3'-phosphate
  modified_base 12: mod_base = OTHER; note = 2'-O-methyladenosine-3'-phosphate
  modified_base 13: mod_base = OTHER; note = 2'-O-methylguanosine-3'-phosphate
  modified_base 14: mod_base = OTHER; note = 2'-deoxy-2'-fluorouridine-3'-phosphate
  modified_base 15: mod_base = OTHER; note = 2'-O-methylcytidine-3'-phosphate
  modified_base 16: mod_base = OTHER; note = 2'-deoxy-2'-fluorouridine-3'-phosphate
  modified_base 17: mod_base = OTHER; note = 2'-O-methyluridine-3'-phosphate
  modified_base 18: mod_base = OTHER; note = 2'-O-methyluridine-3'-phosphate
  modified_base 19: mod_base = OTHER; note = 2'-O-methyluridine-3'-phosphate
  modified_base 20: mod_base = OTHER; note = 2'-O-methylguanosine-3'-phosphate
  modified_base 21: mod_base = OTHER; note = 2'-O-methyluridine-3'-phosphorothioate
  modified_base 22: mod_base = OTHER; note = 2'-O-methyluridine-3'-phosphorothioate
  modified_base 23: mod_base = OTHER; note = 2'-O-methyluridine
actcgaagtcgagtcttttgttt

SEQ ID NO: 1277 - RNA, 23 nt, synthetic construct
  source 1..23: mol_type = other RNA
  modified_base 1: mod_base = OTHER; note = 2'-O-methyladenosine-3'-phosphorothioate
  modified_base 2: mod_base = OTHER; note = 2'-deoxy-2'-fluorocytidine-3'-phosphorothioate
  modified_base 3: mod_base = OTHER; note = 2'-O-methyladenosine-3'-phosphate
  modified_base 4: mod_base = OTHER; note = 2'-O-methyluridine-3'-phosphate
  modified_base 5: mod_base = OTHER; note = 2'-O-methylguanosine-3'-phosphate
  modified_base 6: mod_base = OTHER; note = 2'-deoxy-2'-fluoroguanosine-3'-phosphate
  modified_base 7: mod_base = OTHER; note = 2'-O-methylcytidine-3'-phosphate
  modified_base 8: mod_base = OTHER; note = 2'-deoxy-2'-fluorouridine-3'-phosphate
  modified_base 9: mod_base = OTHER; note = 2'-deoxy-2'-fluorocytidine-3'-phosphate
  modified_base 10: mod_base = OTHER; note = 2'-O-methylguanosine-3'-phosphate
  modified_base 11: mod_base = OTHER; note = 2'-O-methyladenosine-3'-phosphate
  modified_base 12: mod_base = OTHER; note = 2'-O-methyladenosine-3'-phosphate
  modified_base 13: mod_base = OTHER; note = 2'-O-methylguanosine-3'-phosphate
  modified_base 14: mod_base = OTHER; note = 2'-deoxy-2'-fluorouridine-3'-phosphate
  modified_base 15: mod_base = OTHER; note = 2'-O-methylcytidine-3'-phosphate
  modified_base 16: mod_base = OTHER; note = 2'-deoxy-2'-fluoroguanosine-3'-phosphate
  modified_base 17: mod_base = OTHER; note = 2'-O-methyladenosine-3'-phosphate
  modified_base 18: mod_base = OTHER; note = 2'-O-methylguanosine-3'-phosphate
  modified_base 19: mod_base = OTHER; note = 2'-O-methyluridine-3'-phosphate
  modified_base 20: mod_base = OTHER; note = 2'-O-methylcytidine-3'-phosphate
  modified_base 21: mod_base = OTHER; note = 2'-O-methyluridine-3'-phosphorothioate
  modified_base 22: mod_base = OTHER; note = 2'-O-methyluridine-3'-phosphorothioate
  modified_base 23: mod_base = OTHER; note = 2'-O-methyluridine
acatggctcgaagtcgagtcttt

SEQ ID NO: 1278 - RNA, 23 nt, synthetic construct
  source 1..23: mol_type = other RNA
  modified_base 1: mod_base = OTHER; note = 2'-O-methyladenosine-3'-phosphorothioate
  modified_base 2: mod_base = OTHER; note = 2'-deoxy-2'-fluorouridine-3'-phosphorothioate
  modified_base 3: mod_base = OTHER; note = 2'-O-methyluridine-3'-phosphate
  modified_base 4: mod_base = OTHER; note = 2'-O-methyluridine-3'-phosphate
  modified_base 5: mod_base = OTHER; note = 2'-O-methyluridine-3'-phosphate
  modified_base 6: mod_base = OTHER; note = 2'-deoxy-2'-fluorocytidine-3'-phosphate
  modified_base 7: mod_base = OTHER; note = 2'-O-methylcytidine-3'-phosphate
  modified_base 8: mod_base = OTHER; note = 2'-deoxy-2'-fluorocytidine-3'-phosphate
  modified_base 9: mod_base = OTHER; note = 2'-deoxy-2'-fluoroadenosine-3'-phosphate
  modified_base 10: mod_base = OTHER; note = 2'-O-methyluridine-3'-phosphate
  modified_base 11: mod_base = OTHER; note = 2'-O-methylguanosine-3'-phosphate
  modified_base 12: mod_base = OTHER; note = 2'-O-methylguanosine-3'-phosphate
  modified_base 13: mod_base = OTHER; note = 2'-O-methylcytidine-3'-phosphate
  modified_base 14: mod_base = OTHER; note = 2'-deoxy-2'-fluorouridine-3'-phosphate
  modified_base 15: mod_base = OTHER; note = 2'-O-methylcytidine-3'-phosphate
  modified_base 16: mod_base = OTHER; note = 2'-deoxy-2'-fluoroguanosine-3'-phosphate
  modified_base 17: mod_base = OTHER; note = 2'-O-methyladenosine-3'-phosphate
  modified_base 18: mod_base = OTHER; note = 2'-O-methyladenosine-3'-phosphate
  modified_base 19: mod_base = OTHER; note = 2'-O-methylguanosine-3'-phosphate
  modified_base 20: mod_base = OTHER; note = 2'-O-methyluridine-3'-phosphate
  modified_base 21: mod_base = OTHER; note = 2'-O-methylcytidine-3'-phosphorothioate
  modified_base 22: mod_base = OTHER; note = 2'-O-methylguanosine-3'-phosphorothioate
  modified_base 23: mod_base = OTHER; note = 2'-O-methyladenosine
attttcccatggctcgaagtcga

SEQ ID NO: 1279 - RNA, 23 nt, synthetic construct
  source 1..23: mol_type = other RNA
  modified_base 1: mod_base = OTHER; note = 2'-O-methyladenosine-3'-phosphorothioate
  modified_base 2: mod_base = OTHER; note = 2'-deoxy-2'-fluorouridine-3'-phosphorothioate
  modified_base 3: mod_base = OTHER; note = 2'-O-methyluridine-3'-phosphate
  modified_base 4: mod_base = OTHER; note = 2'-O-methylcytidine-3'-phosphate
  modified_base 5: mod_base = OTHER; note = 2'-O-methylcytidine-3'-phosphate
  modified_base 6: mod_base = OTHER; note = 2'-deoxy-2'-fluorocytidine-3'-phosphate
  modified_base 7: mod_base = OTHER; note = 2'-O-methyluridine-3'-phosphate
  modified_base 8: mod_base = OTHER; note = 2'-deoxy-2'-fluorouridine-3'-phosphate
  modified_base 9: mod_base = OTHER; note = 2'-deoxy-2'-fluorouridine-3'-phosphate
  modified_base 10: mod_base = OTHER; note = 2'-O-methyluridine-3'-phosphate
  modified_base 11: mod_base = OTHER; note = 2'-O-methylcytidine-3'-phosphate
  modified_base 12: mod_base = OTHER; note = 2'-O-methylcytidine-3'-phosphate
  modified_base 13: mod_base = OTHER; note = 2'-O-methylcytidine-3'-phosphate
  modified_base 14: mod_base = OTHER; note = 2'-deoxy-2'-fluoroadenosine-3'-phosphate
  modified_base 15: mod_base = OTHER; note = 2'-O-methyluridine-3'-phosphate
  modified_base 16: mod_base = OTHER; note = 2'-deoxy-2'-fluoroguanosine-3'-phosphate
  modified_base 17: mod_base = OTHER; note = 2'-O-methylguanosine-3'-phosphate
  modified_base 18: mod_base = OTHER; note = 2'-O-methylcytidine-3'-phosphate
  modified_base 19: mod_base = OTHER; note = 2'-O-methyluridine-3'-phosphate
  modified_base 20: mod_base = OTHER; note = 2'-O-methylcytidine-3'-phosphate
  modified_base 21: mod_base = OTHER; note = 2'-O-methylguanosine-3'-phosphorothioate
  modified_base 22: mod_base = OTHER; note = 2'-O-methyladenosine-3'-phosphorothioate
  modified_base 23: mod_base = OTHER; note = 2'-O-methyladenosine
attcccttttcccatggctcgaa

SEQ ID NO: 1280 - RNA, 23 nt, synthetic construct
  source 1..23: mol_type = other RNA
  modified_base 1: mod_base = OTHER; note = 2'-O-methyladenosine-3'-phosphorothioate
  modified_base 2: mod_base = OTHER; note = 2'-deoxy-2'-fluorocytidine-3'-phosphorothioate
  modified_base 3: mod_base = OTHER; note = 2'-O-methylguanosine-3'-phosphate
  modified_base 4: mod_base = OTHER; note = 2'-O-methyladenosine-3'-phosphate
  modified_base 5: mod_base = OTHER; note = 2'-O-methylguanosine-3'-phosphate
  modified_base 6: mod_base = OTHER; note = 2'-deoxy-2'-fluoroguanosine-3'-phosphate
  modified_base 7: mod_base = OTHER; note = 2'-O-methyluridine-3'-phosphate
  modified_base 8: mod_base = OTHER; note = 2'-deoxy-2'-fluorouridine-3'-phosphate
  modified_base 9: mod_base = OTHER; note = 2'-deoxy-2'-fluorocytidine-3'-phosphate
  modified_base 10: mod_base = OTHER; note = 2'-O-methylcytidine-3'-phosphate
  modified_base 11: mod_base = OTHER; note = 2'-O-methylcytidine-3'-phosphate
  modified_base 12: mod_base = OTHER; note = 2'-O-methyluridine-3'-phosphate
  modified_base 13: mod_base = OTHER; note = 2'-O-methyluridine-3'-phosphate
  modified_base 14: mod_base = OTHER; note = 2'-deoxy-2'-fluorouridine-3'-phosphate
  modified_base 15: mod_base = OTHER; note = 2'-O-methyluridine-3'-phosphate
  modified_base 16: mod_base = OTHER; note = 2'-deoxy-2'-fluorocytidine-3'-phosphate
  modified_base 17: mod_base = OTHER; note = 2'-O-methylcytidine-3'-phosphate
  modified_base 18: mod_base = OTHER; note = 2'-O-methylcytidine-3'-phosphate
  modified_base 19: mod_base = OTHER; note = 2'-O-methyladenosine-3'-phosphate
  modified_base 20: mod_base = OTHER; note = 2'-O-methyluridine-3'-phosphate
  modified_base 21: mod_base = OTHER; note = 2'-O-methylguanosine-3'-phosphorothioate
  modified_base 22: mod_base = OTHER; note = 2'-O-methylguanosine-3'-phosphorothioate
  modified_base 23: mod_base = OTHER; note = 2'-O-methylcytidine
acgaggttcccttttcccatggc

SEQ ID NO: 1281 - RNA, 23 nt, synthetic construct
  source 1..23: mol_type = other RNA
  modified_base 1: mod_base = OTHER; note = 2'-O-methyladenosine-3'-phosphorothioate
  modified_base 2: mod_base = OTHER; note = 2'-deoxy-2'-fluorouridine-3'-phosphorothioate
  modified_base 3: mod_base = OTHER; note = 2'-O-methyluridine-3'-phosphate
  modified_base 4: mod_base = OTHER; note = 2'-O-methylguanosine-3'-phosphate
  modified_base 5: mod_base = OTHER; note = 2'-O-methyladenosine-3'-phosphate
  modified_base 6: mod_base = OTHER; note = 2'-deoxy-2'-fluorocytidine-3'-phosphate
  modified_base 7: mod_base = OTHER; note = 2'-O-methyluridine-3'-phosphate
  modified_base 8: mod_base = OTHER; note = 2'-deoxy-2'-fluorouridine-3'-phosphate
  modified_base 9: mod_base = OTHER; note = 2'-deoxy-2'-fluorocytidine-3'-phosphate
  modified_base 10: mod_base = OTHER; note = 2'-O-methylguanosine-3'-phosphate
  modified_base 11: mod_base = OTHER; note = 2'-O-methyladenosine-3'-phosphate
  modified_base 12: mod_base = OTHER; note = 2'-O-methylguanosine-3'-phosphate
  modified_base 13: mod_base = OTHER; note = 2'-O-methylguanosine-3'-phosphate
  modified_base 14: mod_base = OTHER; note = 2'-deoxy-2'-fluorouridine-3'-phosphate
  modified_base 15: mod_base = OTHER; note = 2'-O-methyluridine-3'-phosphate
  modified_base 16: mod_base = OTHER; note = 2'-deoxy-2'-fluorocytidine-3'-phosphate
  modified_base 17: mod_base = OTHER; note = 2'-O-methylcytidine-3'-phosphate
  modified_base 18: mod_base = OTHER; note = 2'-O-methylcytidine-3'-phosphate
  modified_base 19: mod_base = OTHER; note = 2'-O-methyluridine-3'-phosphate
  modified_base 20: mod_base = OTHER; note = 2'-O-methyluridine-3'-phosphate
  modified_base 21: mod_base = OTHER; note = 2'-O-methyluridine-3'-phosphorothioate
  modified_base 22: mod_base = OTHER; note = 2'-O-methyluridine-3'-phosphorothioate
  modified_base 23: mod_base = OTHER; note = 2'-O-methylcytidine
attgacttcgaggttcccttttc

SEQ ID NO: 1282 - RNA, 23 nt, synthetic construct
  source 1..23: mol_type = other RNA
  modified_base 1: mod_base = OTHER; note = 2'-O-methyladenosine-3'-phosphorothioate
  modified_base 2: mod_base = OTHER; note = 2'-deoxy-2'-fluorouridine-3'-phosphorothioate
  modified_base 3: mod_base = OTHER; note = 2'-O-methyluridine-3'-phosphate
  modified_base 4: mod_base = OTHER; note = 2'-O-methyluridine-3'-phosphate
  modified_base 5: mod_base = OTHER; note = 2'-O-methylcytidine-3'-phosphate
  modified_base 6: mod_base = OTHER; note = 2'-deoxy-2'-fluorouridine-3'-phosphate
  modified_base 7: mod_base = OTHER; note = 2'-O-methylguanosine-3'-phosphate
  modified_base 8: mod_base = OTHER; note = 2'-deoxy-2'-fluorouridine-3'-phosphate
  modified_base 9: mod_base = OTHER; note = 2'-deoxy-2'-fluorouridine-3'-phosphate
  modified_base 10: mod_base = OTHER; note = 2'-O-methylguanosine-3'-phosphate
  modified_base 11: mod_base = OTHER; note = 2'-O-methyladenosine-3'-phosphate
  modified_base 12: mod_base = OTHER; note = 2'-O-methylcytidine-3'-phosphate
  modified_base 13: mod_base = OTHER; note = 2'-O-methyluridine-3'-phosphate
  modified_base 14: mod_base = OTHER; note = 2'-deoxy-2'-fluorouridine-3'-phosphate
  modified_base 15: mod_base = OTHER; note = 2'-O-methylcytidine-3'-phosphate
  modified_base 16: mod_base = OTHER; note = 2'-deoxy-2'-fluoroguanosine-3'-phosphate
  modified_base 17: mod_base = OTHER; note = 2'-O-methyladenosine-3'-phosphate
  modified_base 18: mod_base = OTHER; note = 2'-O-methylguanosine-3'-phosphate
  modified_base 19: mod_base = OTHER; note = 2'-O-methylguanosine-3'-phosphate
  modified_base 20: mod_base = OTHER; note = 2'-O-methyluridine-3'-phosphate
  modified_base 21: mod_base = OTHER; note = 2'-O-methyluridine-3'-phosphorothioate
  modified_base 22: mod_base = OTHER; note = 2'-O-methylcytidine-3'-phosphorothioate
  modified_base 23: mod_base = OTHER; note = 2'-O-methylcytidine
atttctgttgacttcgaggttcc

SEQ ID NO: 1283 - RNA, 23 nt, synthetic construct
  source 1..23: mol_type = other RNA
  modified_base 1: mod_base = OTHER; note = 2'-O-methyladenosine-3'-phosphorothioate
  modified_base 2: mod_base = OTHER; note = 2'-deoxy-2'-fluoroguanosine-3'-phosphorothioate
  modified_base 3: mod_base = OTHER; note = 2'-O-methyladenosine-3'-phosphate
  modified_base 4: mod_base = OTHER; note = 2'-O-methyluridine-3'-phosphate
  modified_base 5: mod_base = OTHER; note = 2'-O-methyluridine-3'-phosphate
  modified_base 6: mod_base = OTHER; note = 2'-deoxy-2'-fluorouridine-3'-phosphate
  modified_base 7: mod_base = OTHER; note = 2'-O-methylguanosine-3'-phosphate
  modified_base 8: mod_base = OTHER; note = 2'-deoxy-2'-fluorouridine-3'-phosphate
  modified_base 9: mod_base = OTHER; note = 2'-deoxy-2'-fluorouridine-3'-phosphate
  modified_base 10: mod_base = OTHER; note = 2'-O-methyluridine-3'-phosphate
  modified_base 11: mod_base = OTHER; note = 2'-O-methylcytidine-3'-phosphate
  modified_base 12: mod_base = OTHER; note = 2'-O-methyluridine-3'-phosphate
  modified_base 13: mod_base = OTHER; note = 2'-O-methylguanosine-3'-phosphate
  modified_base 14: mod_base = OTHER; note = 2'-deoxy-2'-fluorouridine-3'-phosphate
  modified_base 15: mod_base = OTHER; note = 2'-O-methyluridine-3'-phosphate
  modified_base 16: mod_base = OTHER; note = 2'-deoxy-2'-fluoroguanosine-3'-phosphate
  modified_base 17: mod_base = OTHER; note = 2'-O-methyladenosine-3'-phosphate
  modified_base 18: mod_base = OTHER; note = 2'-O-methylcytidine-3'-phosphate
  modified_base 19: mod_base = OTHER; note = 2'-O-methyluridine-3'-phosphate
  modified_base 20: mod_base = OTHER; note = 2'-O-methyluridine-3'-phosphate
  modified_base 21: mod_base = OTHER; note = 2'-O-methylcytidine-3'-phosphorothioate
  modified_base 22: mod_base = OTHER; note = 2'-O-methylguanosine-3'-phosphorothioate
  modified_base 23: mod_base = OTHER; note = 2'-O-methyladenosine
agatttgtttctgttgacttcga

SEQ ID NO: 1284 - RNA, 23 nt, synthetic construct
  source 1..23: mol_type = other RNA
  modified_base 1: mod_base = OTHER; note = 2'-O-methyladenosine-3'-phosphorothioate
  modified_base 2: mod_base = OTHER; note = 2'-deoxy-2'-fluoroguanosine-3'-phosphorothioate
  modified_base 3: mod_base = OTHER; note = 2'-O-methylguanosine-3'-phosphate
  modified_base 4: mod_base = OTHER; note = 2'-O-methylguanosine-3'-phosphate
  modified_base 5: mod_base = OTHER; note = 2'-O-methyladenosine-3'-phosphate
  modified_base 6: mod_base = OTHER; note = 2'-deoxy-2'-fluoroguanosine-3'-phosphate
  modified_base 7: mod_base = OTHER; note = 2'-O-methylguanosine-3'-phosphate
  modified_base 8: mod_base = OTHER; note = 2'-deoxy-2'-fluoroadenosine-3'-phosphate
  modified_base 9: mod_base = OTHER; note = 2'-deoxy-2'-fluorouridine-3'-phosphate
  modified_base 10: mod_base = OTHER; note = 2'-O-methyluridine-3'-phosphate
  modified_base 11: mod_base = OTHER; note = 2'-O-methyluridine-3'-phosphate
  modified_base 12: mod_base = OTHER; note = 2'-O-methylguanosine-3'-phosphate
  modified_base 13: mod_base = OTHER; note = 2'-O-methyluridine-3'-phosphate
  modified_base 14: mod_base = OTHER; note = 2'-deoxy-2'-fluorouridine-3'-phosphate
  modified_base 15: mod_base = OTHER; note = 2'-O-methyluridine-3'-phosphate
  modified_base 16: mod_base = OTHER; note = 2'-deoxy-2'-fluorocytidine-3'-phosphate
  modified_base 17: mod_base = OTHER; note = 2'-O-methyluridine-3'-phosphate
  modified_base 18: mod_base = OTHER; note = 2'-O-methylguanosine-3'-phosphate
  modified_base 19: mod_base = OTHER; note = 2'-O-methyluridine-3'-phosphate
  modified_base 20: mod_base = OTHER; note = 2'-O-methyluridine-3'-phosphate
  modified_base 21: mod_base = OTHER; note = 2'-O-methylguanosine-3'-phosphorothioate
  modified_base 22: mod_base = OTHER; note = 2'-O-methyladenosine-3'-phosphorothioate
  modified_base 23: mod_base = OTHER; note = 2'-O-methylcytidine
agggaggatttgtttctgttgac

SEQ ID NO: 1285 - RNA, 23 nt, synthetic construct
  source 1..23: mol_type = other RNA
  modified_base 1: mod_base = OTHER; note = 2'-O-methyladenosine-3'-phosphorothioate
  modified_base 2: mod_base = OTHER; note = 2'-deoxy-2'-fluorocytidine-3'-phosphorothioate
  modified_base 3: mod_base = OTHER; note = 2'-O-methyladenosine-3'-phosphate
  modified_base 4: mod_base = OTHER; note = 2'-O-methyluridine-3'-phosphate
  modified_base 5: mod_base = OTHER; note = 2'-O-methylguanosine-3'-phosphate
  modified_base 6: mod_base = OTHER; note = 2'-deoxy-2'-fluoroadenosine-3'-phosphate
  modified_base 7: mod_base = OTHER; note = 2'-O-methyluridine-3'-phosphate
  modified_base 8: mod_base = OTHER; note = 2'-deoxy-2'-fluoroguanosine-3'-phosphate
  modified_base 9: mod_base = OTHER; note = 2'-deoxy-2'-fluoroguanosine-3'-phosphate
  modified_base 10: mod_base = OTHER; note = 2'-O-methylguanosine-3'-phosphate
  modified_base 11: mod_base = OTHER; note = 2'-O-methyladenosine-3'-phosphate
  modified_base 12: mod_base = OTHER; note = 2'-O-methylguanosine-3'-phosphate
  modified_base 13: mod_base = OTHER; note = 2'-O-methylguanosine-3'-phosphate
  modified_base 14: mod_base = OTHER; note = 2'-deoxy-2'-fluoroadenosine-3'-phosphate
  modified_base 15: mod_base = OTHER; note = 2'-O-methyluridine-3'-phosphate
  modified_base 16: mod_base = OTHER; note = 2'-deoxy-2'-fluorouridine-3'-phosphate
  modified_base 17: mod_base = OTHER; note = 2'-O-methyluridine-3'-phosphate
  modified_base 18: mod_base = OTHER; note = 2'-O-methylguanosine-3'-phosphate
  modified_base 19: mod_base = OTHER; note = 2'-O-methyluridine-3'-phosphate
  modified_base 20: mod_base = OTHER; note = 2'-O-methyluridine-3'-phosphate
  modified_base 21: mod_base = OTHER; note = 2'-O-methyluridine-3'-phosphorothioate
  modified_base 22: mod_base = OTHER; note = 2'-O-methylcytidine-3'-phosphorothioate
  modified_base 23: mod_base = OTHER; note = 2'-O-methyluridine
acatgatgggaggatttgtttct

SEQ ID NO: 1286 - RNA, 23 nt, synthetic construct
  source 1..23: mol_type = other RNA
  modified_base 1: mod_base = OTHER; note = 2'-O-methyladenosine-3'-phosphorothioate
  modified_base 2: mod_base = OTHER; note = 2'-deoxy-2'-fluorouridine-3'-phosphorothioate
  modified_base 3: mod_base = OTHER; note = 2'-O-methyluridine-3'-phosphate
  modified_base 4: mod_base = OTHER; note = 2'-O-methylguanosine-3'-phosphate
  modified_base 5: mod_base = OTHER; note = 2'-O-methyluridine-3'-phosphate
  modified_base 6: mod_base = OTHER; note = 2'-deoxy-2'-fluorouridine-3'-phosphate
  modified_base 7: mod_base = OTHER; note = 2'-O-methyluridine-3'-phosphate
  modified_base 8: mod_base = OTHER; note = 2'-deoxy-2'-fluorocytidine-3'-phosphate
  modified_base 9: mod_base = OTHER; note = 2'-deoxy-2'-fluoroadenosine-3'-phosphate
  modified_base 10: mod_base = OTHER; note = 2'-O-methyluridine-3'-phosphate
  modified_base 11: mod_base = OTHER; note = 2'-O-methylguanosine-3'-phosphate
  modified_base 12: mod_base = OTHER; note = 2'-O-methyladenosine-3'-phosphate
  modified_base 13: mod_base = OTHER; note = 2'-O-methyluridine-3'-phosphate
  modified_base 14: mod_base = OTHER; note = 2'-deoxy-2'-fluoroguanosine-3'-phosphate
  modified_base 15: mod_base = OTHER; note = 2'-O-methylguanosine-3'-phosphate
  modified_base 16: mod_base = OTHER; note = 2'-deoxy-2'-fluoroguanosine-3'-phosphate
  modified_base 17: mod_base = OTHER; note = 2'-O-methyladenosine-3'-phosphate
  modified_base 18: mod_base = OTHER; note = 2'-O-methylguanosine-3'-phosphate
  modified_base 19: mod_base = OTHER; note = 2'-O-methylguanosine-3'-phosphate
  modified_base 20: mod_base = OTHER; note = 2'-O-methyladenosine-3'-phosphate
  modified_base 21: mod_base = OTHER; note = 2'-O-methyluridine-3'-phosphorothioate
  modified_base 22: mod_base = OTHER; note = 2'-O-methyluridine-3'-phosphorothioate
  modified_base 23: mod_base = OTHER; note = 2'-O-methyluridine
attgtttcatgatgggaggattt

SEQ ID NO: 1287 - RNA, 23 nt, synthetic construct
  source 1..23: mol_type = other RNA
  modified_base 1: mod_base = OTHER; note = 2'-O-methyladenosine-3'-phosphorothioate
  modified_base 2: mod_base = OTHER; note = 2'-deoxy-2'-fluoroadenosine-3'-phosphorothioate
  modified_base 3: mod_base = OTHER; note = 2'-O-methylguanosine-3'-phosphate
  modified_base 4: mod_base = OTHER; note = 2'-O-methyladenosine-3'-phosphate
  modified_base 5: mod_base = OTHER; note = 2'-O-methylguanosine-3'-phosphate
  modified_base 6: mod_base = OTHER; note = 2'-deoxy-2'-fluorouridine-3'-phosphate
  modified_base 7: mod_base = OTHER; note = 2'-O-methyluridine-3'-phosphate
  modified_base 8: mod_base = OTHER; note = 2'-deoxy-2'-fluorouridine-3'-phosphate
  modified_base 9: mod_base = OTHER; note = 2'-deoxy-2'-fluoroguanosine-3'-phosphate
  modified_base 10: mod_base = OTHER; note = 2'-O-methyluridine-3'-phosphate
  modified_base 11: mod_base = OTHER; note = 2'-O-methyluridine-3'-phosphate
  modified_base 12: mod_base = OTHER; note = 2'-O-methyluridine-3'-phosphate
  modified_base 13: mod_base = OTHER; note = 2'-O-methylcytidine-3'-phosphate
  modified_base 14: mod_base = OTHER; note = 2'-deoxy-2'-fluoroadenosine-3'-phosphate
  modified_base 15: mod_base = OTHER; note = 2'-O-methyluridine-3'-phosphate
  modified_base 16: mod_base = OTHER; note = 2'-deoxy-2'-fluoroguanosine-3'-phosphate
  modified_base 17: mod_base = OTHER; note = 2'-O-methyladenosine-3'-phosphate
  modified_base 18: mod_base = OTHER; note = 2'-O-methyluridine-3'-phosphate
  modified_base 19: mod_base = OTHER; note = 2'-O-methylguanosine-3'-phosphate
  modified_base 20: mod_base = OTHER; note = 2'-O-methylguanosine-3'-phosphate
  modified_base 21: mod_base = OTHER; note = 2'-O-methylguanosine-3'-phosphorothioate
  modified_base 22: mod_base = OTHER; note = 2'-O-methyladenosine-3'-phosphorothioate
  modified_base 23: mod_base = OTHER; note = 2'-O-methylguanosine
aagagtttgtttcatgatgggag

SEQ ID NO: 1288 - RNA, 23 nt, synthetic construct
  source 1..23: mol_type = other RNA
  modified_base 1: mod_base = OTHER; note = 2'-O-methyladenosine-3'-phosphorothioate
  modified_base 2: mod_base = OTHER; note = 2'-deoxy-2'-fluoroguanosine-3'-phosphorothioate
  modified_base 3: mod_base = OTHER; note = 2'-O-methyluridine-3'-phosphate
  modified_base 4: mod_base = OTHER; note = 2'-O-methyladenosine-3'-phosphate
  modified_base 5: mod_base = OTHER; note = 2'-O-methylguanosine-3'-phosphate
  modified_base 6: mod_base = OTHER; note = 2'-deoxy-2'-fluoroguanosine-3'-phosphate
  modified_base 7: mod_base = OTHER; note = 2'-O-methylcytidine-3'-phosphate
  modified_base 8: mod_base = OTHER; note = 2'-deoxy-2'-fluoroadenosine-3'-phosphate
  modified_base 9: mod_base = OTHER; note = 2'-deoxy-2'-fluoroguanosine-3'-phosphate
  modified_base 10: mod_base = OTHER; note = 2'-O-methyladenosine-3'-phosphate
  modified_base 11: mod_base = OTHER; note = 2'-O-methylguanosine-3'-phosphate
  modified_base 12: mod_base = OTHER; note = 2'-O-methyluridine-3'-phosphate
  modified_base 13: mod_base = OTHER; note = 2'-O-methyluridine-3'-phosphate
  modified_base 14: mod_base = OTHER; note = 2'-deoxy-2'-fluorouridine-3'-phosphate
  modified_base 15: mod_base = OTHER; note = 2'-O-methylguanosine-3'-phosphate
  modified_base 16: mod_base = OTHER; note = 2'-deoxy-2'-fluorouridine-3'-phosphate
  modified_base 17: mod_base = OTHER; note = 2'-O-methyluridine-3'-phosphate
  modified_base 18: mod_base = OTHER; note = 2'-O-methyluridine-3'-phosphate
  modified_base 19: mod_base = OTHER; note = 2'-O-methylcytidine-3'-phosphate
  modified_base 20: mod_base = OTHER; note = 2'-O-methyladenosine-3'-phosphate
  modified_base 21: mod_base = OTHER; note = 2'-O-methyluridine-3'-phosphorothioate
  modified_base 22: mod_base = OTHER; note = 2'-O-methylguanosine-3'-phosphorothioate
  modified_base 23: mod_base = OTHER; note = 2'-O-methyladenosine
agtaggcagagtttgtttcatga

SEQ ID NO: 1289 - RNA, 23 nt, synthetic construct
  source 1..23: mol_type = other RNA
  modified_base 1: mod_base = OTHER; note = 2'-O-methyladenosine-3'-phosphorothioate
  modified_base 2: mod_base = OTHER; note = 2'-deoxy-2'-fluoroadenosine-3'-phosphorothioate
  modified_base 3: mod_base = OTHER; note = 2'-O-methylguanosine-3'-phosphate
  modified_base 4: mod_base = OTHER; note = 2'-O-methyladenosine-3'-phosphate
  modified_base 5: mod_base = OTHER; note = 2'-O-methyluridine-3'-phosphate
  modified_base 6: mod_base = OTHER; note = 2'-deoxy-2'-fluoroadenosine-3'-phosphate
  modified_base 7: mod_base = OTHER; note = 2'-O-methyladenosine-3'-phosphate
  modified_base 8: mod_base = OTHER; note = 2'-deoxy-2'-fluorocytidine-3'-phosphate
  modified_base 9: mod_base = OTHER; note = 2'-deoxy-2'-fluoroadenosine-3'-phosphate
  modified_base 10: mod_base = OTHER; note = 2'-O-methyluridine-3'-phosphate
  modified_base 11: mod_base = OTHER; note = 2'-O-methylguanosine-3'-phosphate
  modified_base 12: mod_base = OTHER; note = 2'-O-methyluridine-3'-phosphate
  modified_base 13: mod_base = OTHER; note = 2'-O-methyladenosine-3'-phosphate
  modified_base 14: mod_base = OTHER; note = 2'-deoxy-2'-fluoroguanosine-3'-phosphate
  modified_base 15: mod_base = OTHER; note = 2'-O-methylguanosine-3'-phosphate
  modified_base 16: mod_base = OTHER; note = 2'-deoxy-2'-fluorocytidine-3'-phosphate
  modified_base 17: mod_base = OTHER; note = 2'-O-methyladenosine-3'-phosphate
  modified_base 18: mod_base = OTHER; note = 2'-O-methylguanosine-3'-phosphate
  modified_base 19: mod_base = OTHER; note = 2'-O-methyladenosine-3'-phosphate
  modified_base 20: mod_base = OTHER; note = 2'-O-methylguanosine-3'-phosphate
  modified_base 21: mod_base = OTHER; note = 2'-O-methyluridine-3'-phosphorothioate
  modified_base 22: mod_base = OTHER; note = 2'-O-methyluridine-3'-phosphorothioate
  modified_base 23: mod_base = OTHER; note = 2'-O-methyluridine
aagataacatgtaggcagagttt

SEQ ID NO: 1290 - RNA, 23 nt, synthetic construct
  source 1..23: mol_type = other RNA
  modified_base 1: mod_base = OTHER; note = 2'-O-methyladenosine-3'-phosphorothioate
  modified_base 2: mod_base = OTHER; note = 2'-deoxy-2'-fluorouridine-3'-phosphorothioate
  modified_base 3: mod_base = OTHER; note = 2'-O-methyluridine-3'-phosphate
  modified_base 4: mod_base = OTHER; note = 2'-O-methyluridine-3'-phosphate
  modified_base 5: mod_base = OTHER; note = 2'-O-methylguanosine-3'-phosphate
  modified_base 6: mod_base = OTHER; note = 2'-deoxy-2'-fluoroguanosine-3'-phosphate
  modified_base 7: mod_base = OTHER; note = 2'-O-methyladenosine-3'-phosphate
  modified_base 8: mod_base = OTHER; note = 2'-deoxy-2'-fluoroguanosine-3'-phosphate
  modified_base 9: mod_base = OTHER; note = 2'-deoxy-2'-fluoroadenosine-3'-phosphate
  modified_base 10: mod_base = OTHER; note = 2'-O-methyluridine-3'-phosphate
  modified_base 11: mod_base = OTHER; note = 2'-O-methyladenosine-3'-phosphate
  modified_base 12: mod_base = OTHER; note = 2'-O-methyladenosine-3'-phosphate
  modified_base 13: mod_base = OTHER; note = 2'-O-methylcytidine-3'-phosphate
  modified_base 14: mod_base = OTHER; note = 2'-deoxy-2'-fluoroadenosine-3'-phosphate
  modified_base 15: mod_base = OTHER; note = 2'-O-methyluridine-3'-phosphate
  modified_base 16: mod_base = OTHER; note = 2'-deoxy-2'-fluoroguanosine-3'-phosphate
  modified_base 17: mod_base = OTHER; note = 2'-O-methyluridine-3'-phosphate
  modified_base 18: mod_base = OTHER; note = 2'-O-methyladenosine-3'-phosphate
  modified_base 19: mod_base = OTHER; note = 2'-O-methylguanosine-3'-phosphate
  modified_base 20: mod_base = OTHER; note = 2'-O-methylguanosine-3'-phosphate
  modified_base 21: mod_base = OTHER; note = 2'-O-methylcytidine-3'-phosphorothioate
  modified_base 22: mod_base = OTHER; note = 2'-O-methyladenosine-3'-phosphorothioate
  modified_base 23: mod_base = OTHER; note = 2'-O-methylguanosine
atttggagataacatgtaggcag

SEQ ID NO: 1291 - RNA, 23 nt, synthetic construct
  source 1..23: mol_type = other RNA
  modified_base 1: mod_base = OTHER; note = 2'-O-methyladenosine-3'-phosphorothioate
  modified_base 2: mod_base = OTHER; note = 2'-deoxy-2'-fluoroguanosine-3'-phosphorothioate
  modified_base 3: mod_base = OTHER; note = 2'-O-methyluridine-3'-phosphate
  modified_base 4: mod_base = OTHER; note = 2'-O-methylguanosine-3'-phosphate
  modified_base 5: mod_base = OTHER; note = 2'-O-methylguanosine-3'-phosphate
  modified_base 6: mod_base = OTHER; note = 2'-deoxy-2'-fluorocytidine-3'-phosphate
  modified_base 7: mod_base = OTHER; note = 2'-O-methyluridine-3'-phosphate
  modified_base 8: mod_base = OTHER; note = 2'-deoxy-2'-fluorouridine-3'-phosphate
  modified_base 9: mod_base = OTHER; note = 2'-deoxy-2'-fluorouridine-3'-phosphate
  modified_base 10: mod_base = OTHER; note = 2'-O-methylguanosine-3'-phosphate
  modified_base 11: mod_base = OTHER; note = 2'-O-methylguanosine-3'-phosphate
  modified_base 12: mod_base = OTHER; note = 2'-O-methyladenosine-3'-phosphate
  modified_base 13: mod_base = OTHER; note = 2'-O-methylguanosine-3'-phosphate
  modified_base 14: mod_base = OTHER; note = 2'-deoxy-2'-fluoroadenosine-3'-phosphate
  modified_base 15: mod_base = OTHER; note = 2'-O-methyluridine-3'-phosphate
  modified_base 16: mod_base = OTHER; note = 2'-deoxy-2'-fluoroadenosine-3'-phosphate
  modified_base 17: mod_base = OTHER; note = 2'-O-methyladenosine-3'-phosphate
  modified_base 18: mod_base = OTHER; note = 2'-O-methylcytidine-3'-phosphate
  modified_base 19: mod_base = OTHER; note = 2'-O-methyladenosine-3'-phosphate
  modified_base 20: mod_base = OTHER; note = 2'-O-methyluridine-3'-phosphate
  modified_base 21: mod_base = OTHER; note = 2'-O-methylguanosine-3'-phosphorothioate
  modified_base 22: mod_base = OTHER; note = 2'-O-methyluridine-3'-phosphorothioate
  modified_base 23: mod_base = OTHER; note = 2'-O-methyladenosine
agtggctttggagataacatgta

SEQ ID NO: 1292 - RNA, 23 nt, synthetic construct
  source 1..23: mol_type = other RNA
  modified_base 1: mod_base = OTHER; note = 2'-O-methyladenosine-3'-phosphorothioate
  modified_base 2: mod_base = OTHER; note = 2'-deoxy-2'-fluoroadenosine-3'-phosphorothioate
  modified_base 3: mod_base = OTHER; note = 2'-O-methyluridine-3'-phosphate
  modified_base 4: mod_base = OTHER; note = 2'-O-methyluridine-3'-phosphate
  modified_base 5: mod_base = OTHER; note = 2'-O-methyluridine-3'-phosphate
  modified_base 6: mod_base = OTHER; note = 2'-deoxy-2'-fluorocytidine-3'-phosphate
  modified_base 7: mod_base = OTHER; note = 2'-O-methyluridine-3'-phosphate
  modified_base 8: mod_base = OTHER; note = 2'-deoxy-2'-fluorouridine-3'-phosphate
  modified_base 9: mod_base = OTHER; note = 2'-deoxy-2'-fluorocytidine-3'-phosphate
  modified_base 10: mod_base = OTHER; note = 2'-O-methyluridine-3'-phosphate
  modified_base 11: mod_base = OTHER; note = 2'-O-methylguanosine-3'-phosphate
  modified_base 12: mod_base = OTHER; note = 2'-O-methyluridine-3'-phosphate
  modified_base 13: mod_base = OTHER; note = 2'-O-methylguanosine-3'-phosphate
  modified_base 14: mod_base = OTHER; note = 2'-deoxy-2'-fluoroguanosine-3'-phosphate
  modified_base 15: mod_base = OTHER; note = 2'-O-methylcytidine-3'-phosphate
  modified_base 16: mod_base = OTHER; note = 2'-deoxy-2'-fluorouridine-3'-phosphate
  modified_base 17: mod_base = OTHER; note = 2'-O-methyluridine-3'-phosphate
  modified_base 18: mod_base = OTHER; note = 2'-O-methyluridine-3'-phosphate
  modified_base 19: mod_base = OTHER; note = 2'-O-methylguanosine-3'-phosphate
  modified_base 20: mod_base = OTHER; note = 2'-O-methylguanosine-3'-phosphate
  modified_base 21: mod_base = OTHER; note = 2'-O-methyladenosine-3'-phosphorothioate
  modified_base 22: mod_base = OTHER; note = 2'-O-methylguanosine-3'-phosphorothioate
  modified_base 23: mod_base = OTHER; note = 2'-O-methyladenosine
aatttcttctgtggctttggaga

SEQ ID NO: 1293 - RNA, 23 nt, synthetic construct
  source 1..23: mol_type = other RNA
  modified_base 1: mod_base = OTHER; note = 2'-O-methyladenosine-3'-phosphorothioate
  modified_base 2: mod_base = OTHER; note = 2'-deoxy-2'-fluorocytidine-3'-phosphorothioate
  modified_base 3: mod_base = OTHER; note = 2'-O-methyladenosine-3'-phosphate
  modified_base 4: mod_base = OTHER; note = 2'-O-methylcytidine-3'-phosphate
  modified_base 5: mod_base = OTHER; note = 2'-O-methyladenosine-3'-phosphate
  modified_base 6: mod_base = OTHER; note = 2'-deoxy-2'-fluoroadenosine-3'-phosphate
  modified_base 7: mod_base = OTHER; note = 2'-O-methyladenosine-3'-phosphate
  modified_base 8: mod_base = OTHER; note = 2'-deoxy-2'-fluorouridine-3'-phosphate
  modified_base 9: mod_base = OTHER; note = 2'-deoxy-2'-fluorouridine-3'-phosphate
  modified_base 10: mod_base = OTHER; note = 2'-O-methyluridine-3'-phosphate
  modified_base 11: mod_base = OTHER; note = 2'-O-methylcytidine-3'-phosphate
  modified_base 12: mod_base = OTHER; note = 2'-O-methyluridine-3'-phosphate
  modified_base 13: mod_base = OTHER; note = 2'-O-methyluridine-3'-phosphate
  modified_base 14: mod_base = OTHER; note = 2'-deoxy-2'-fluorocytidine-3'-phosphate
  modified_base 15: mod_base = OTHER; note = 2'-O-methyluridine-3'-phosphate
  modified_base 16: mod_base = OTHER; note = 2'-deoxy-2'-fluoroguanosine-3'-phosphate
  modified_base 17: mod_base = OTHER; note = 2'-O-methyluridine-3'-phosphate
  modified_base 18: mod_base = OTHER; note = 2'-O-methylguanosine-3'-phosphate
  modified_base 19: mod_base = OTHER; note = 2'-O-methylguanosine-3'-phosphate
  modified_base 20: mod_base = OTHER; note = 2'-O-methylcytidine-3'-phosphate
  modified_base 21: mod_base = OTHER; note = 2'-O-methyluridine-3'-phosphorothioate
  modified_base 22: mod_base = OTHER; note = 2'-O-methyluridine-3'-phosphorothioate
  modified_base 23: mod_base = OTHER; note = 2'-O-methyluridine
acacaaatttcttctgtggcttt

SEQ ID NO: 1294 - RNA, 23 nt, synthetic construct
  source 1..23: mol_type = other RNA
  modified_base 1: mod_base = OTHER; note = 2'-O-methyladenosine-3'-phosphorothioate
  modified_base 2: mod_base = OTHER; note = 2'-deoxy-2'-fluorouridine-3'-phosphorothioate
  modified_base 3: mod_base = OTHER; note = 2'-O-methylguanosine-3'-phosphate
  modified_base 4: mod_base = OTHER; note = 2'-O-methylguanosine-3'-phosphate
  modified_base 5: mod_base = OTHER; note = 2'-O-methyluridine-3'-phosphate
  modified_base 6: mod_base = OTHER; note = 2'-deoxy-2'-fluorocytidine-3'-phosphate
  modified_base 7: mod_base = OTHER; note = 2'-O-methylcytidine-3'-phosphate
  modified_base 8: mod_base = OTHER; note = 2'-deoxy-2'-fluoroadenosine-3'-phosphate
  modified_base 9: mod_base = OTHER; note = 2'-deoxy-2'-fluorocytidine-3'-phosphate
  modified_base 10: mod_base = OTHER; note = 2'-O-methyladenosine-3'-phosphate
  modified_base 11: mod_base = OTHER; note = 2'-O-methyladenosine-3'-phosphate
  modified_base 12: mod_base = OTHER; note = 2'-O-methyladenosine-3'-phosphate
  modified_base 13: mod_base = OTHER; note = 2'-O-methyluridine-3'-phosphate
  modified_base 14: mod_base = OTHER; note = 2'-deoxy-2'-fluorouridine-3'-phosphate
  modified_base 15: mod_base = OTHER; note = 2'-O-methyluridine-3'-phosphate
  modified_base 16: mod_base = OTHER; note = 2'-deoxy-2'-fluorocytidine-3'-phosphate
  modified_base 17: mod_base = OTHER; note = 2'-O-methyluridine-3'-phosphate
  modified_base 18: mod_base = OTHER; note = 2'-O-methyluridine-3'-phosphate
  modified_base 19: mod_base = OTHER; note = 2'-O-methylcytidine-3'-phosphate
  modified_base 20: mod_base = OTHER; note = 2'-O-methyluridine-3'-phosphate
  modified_base 21: mod_base = OTHER; note = 2'-O-methylguanosine-3'-phosphorothioate
  modified_base 22: mod_base = OTHER; note = 2'-O-methyluridine-3'-phosphorothioate
  modified_base 23: mod_base = OTHER; note = 2'-O-methylguanosine
atggtccacaaatttcttctgtg

SEQ ID NO: 1295 - RNA, 23 nt, synthetic construct
  source 1..23: mol_type = other RNA
  modified_base 1: mod_base = OTHER; note = 2'-O-methyladenosine-3'-phosphorothioate
  modified_base 2: mod_base = OTHER; note = 2'-deoxy-2'-fluoroadenosine-3'-phosphorothioate
  modified_base 3: mod_base = OTHER; note = 2'-O-methyladenosine-3'-phosphate
  modified_base 4: mod_base = OTHER; note = 2'-O-methylguanosine-3'-phosphate
  modified_base 5: mod_base = OTHER; note = 2'-O-methylcytidine-3'-phosphate
  modified_base 6: mod_base = OTHER; note = 2'-deoxy-2'-fluorocytidine-3'-phosphate
  modified_base 7: mod_base = OTHER; note = 2'-O-methyluridine-3'-phosphate
  modified_base 8: mod_base = OTHER; note = 2'-deoxy-2'-fluoroguanosine-3'-phosphate
  modified_base 9: mod_base = OTHER; note = 2'-deoxy-2'-fluoroguanosine-3'-phosphate
  modified_base 10: mod_base = OTHER; note = 2'-O-methyluridine-3'-phosphate
  modified_base 11: mod_base = OTHER; note = 2'-O-methylcytidine-3'-phosphate
  modified_base 12: mod_base = OTHER; note = 2'-O-methylcytidine-3'-phosphate
  modified_base 13: mod_base = OTHER; note = 2'-O-methyladenosine-3'-phosphate
  modified_base 14: mod_base = OTHER; note = 2'-deoxy-2'-fluorocytidine-3'-phosphate
  modified_base 15: mod_base = OTHER; note = 2'-O-methyladenosine-3'-phosphate
  modified_base 16: mod_base = OTHER; note = 2'-deoxy-2'-fluoroadenosine-3'-phosphate
  modified_base 17: mod_base = OTHER; note = 2'-O-methyladenosine-3'-phosphate
  modified_base 18: mod_base = OTHER; note = 2'-O-methyluridine-3'-phosphate
  modified_base 19: mod_base = OTHER; note = 2'-O-methyluridine-3'-phosphate
  modified_base 20: mod_base = OTHER; note = 2'-O-methyluridine-3'-phosphate
  modified_base 21: mod_base = OTHER; note = 2'-O-methylcytidine-3'-phosphorothioate
  modified_base 22: mod_base = OTHER; note = 2'-O-methyluridine-3'-phosphorothioate
  modified_base 23: mod_base = OTHER; note = 2'-O-methyluridine
aaagcctggtccacaaatttctt

SEQ ID NO: 1296 - RNA, 23 nt, synthetic construct
  source 1..23: mol_type = other RNA
  modified_base 1: mod_base = OTHER; note = 2'-O-methyladenosine-3'-phosphorothioate
  modified_base 2: mod_base = OTHER; note = 2'-deoxy-2'-fluoroadenosine-3'-phosphorothioate
  modified_base 3: mod_base = OTHER; note = 2'-O-methylcytidine-3'-phosphate
  modified_base 4: mod_base = OTHER; note = 2'-O-methyluridine-3'-phosphate
  modified_base 5: mod_base = OTHER; note = 2'-O-methyluridine-3'-phosphate
  modified_base 6: mod_base = OTHER; note = 2'-deoxy-2'-fluoroguanosine-3'-phosphate
  modified_base 7: mod_base = OTHER; note = 2'-O-methylguanosine-3'-phosphate
  modified_base 8: mod_base = OTHER; note = 2'-deoxy-2'-fluoroguanosine-3'-phosphate
  modified_base 9: mod_base = OTHER; note = 2'-deoxy-2'-fluorocytidine-3'-phosphate
  modified_base 10: mod_base = OTHER; note = 2'-O-methylcytidine-3'-phosphate
  modified_base 11: mod_base = OTHER; note = 2'-O-methyladenosine-3'-phosphate
  modified_base 12: mod_base = OTHER; note = 2'-O-methylcytidine-3'-phosphate
  modified_base 13: mod_base = OTHER; note = 2'-O-methyladenosine-3'-phosphate
  modified_base 14: mod_base = OTHER; note = 2'-deoxy-2'-fluoroadenosine-3'-phosphate
  modified_base 15: mod_base = OTHER; note = 2'-O-methylguanosine-3'-phosphate
  modified_base 16: mod_base = OTHER; note = 2'-deoxy-2'-fluorocytidine-3'-phosphate
  modified_base 17: mod_base = OTHER; note = 2'-O-methylcytidine-3'-phosphate
  modified_base 18: mod_base = OTHER; note = 2'-O-methyluridine-3'-phosphate
  modified_base 19: mod_base = OTHER; note = 2'-O-methylguanosine-3'-phosphate
  modified_base 20: mod_base = OTHER; note = 2'-O-methylguanosine-3'-phosphate
  modified_base 21: mod_base = OTHER; note = 2'-O-methyluridine-3'-phosphorothioate
  modified_base 22: mod_base = OTHER; note = 2'-O-methylcytidine-3'-phosphorothioate
  modified_base 23: mod_base = OTHER; note = 2'-O-methylcytidine
aacttgggccacaagcctggtcc

SEQ ID NO: 1297 - RNA, 23 nt, synthetic construct
  source 1..23: mol_type = other RNA
  modified_base 1: mod_base = OTHER; note = 2'-O-methyladenosine-3'-phosphorothioate
  modified_base 2: mod_base = OTHER; note = 2'-deoxy-2'-fluorouridine-3'-phosphorothioate
  modified_base 3: mod_base = OTHER; note = 2'-O-methyluridine-3'-phosphate
  modified_base 4: mod_base = OTHER; note = 2'-O-methyluridine-3'-phosphate
  modified_base 5: mod_base = OTHER; note = 2'-O-methylguanosine-3'-phosphate
  modified_base 6: mod_base = OTHER; note = 2'-deoxy-2'-fluoroadenosine-3'-phosphate
  modified_base 7: mod_base = OTHER; note = 2'-O-methyladenosine-3'-phosphate
  modified_base 8: mod_base = OTHER; note = 2'-deoxy-2'-fluorouridine-3'-phosphate
  modified_base 9: mod_base = OTHER; note = 2'-deoxy-2'-fluoroguanosine-3'-phosphate
  modified_base 10: mod_base = OTHER; note = 2'-O-methyladenosine-3'-phosphate
  modified_base 11: mod_base = OTHER; note = 2'-O-methylcytidine-3'-phosphate
  modified_base 12: mod_base = OTHER; note = 2'-O-methyluridine-3'-phosphate
  modified_base 13: mod_base = OTHER; note = 2'-O-methyluridine-3'-phosphate
  modified_base 14: mod_base = OTHER; note = 2'-deoxy-2'-fluoroguanosine-3'-phosphate
  modified_base 15: mod_base = OTHER; note = 2'-O-methylguanosine-3'-phosphate
  modified_base 16: mod_base = OTHER; note = 2'-deoxy-2'-fluoroguanosine-3'-phosphate
  modified_base 17: mod_base = OTHER; note = 2'-O-methylcytidine-3'-phosphate
  modified_base 18: mod_base = OTHER; note = 2'-O-methylcytidine-3'-phosphate
  modified_base 19: mod_base = OTHER; note = 2'-O-methyladenosine-3'-phosphate
  modified_base 20: mod_base = OTHER; note = 2'-O-methylcytidine-3'-phosphate
  modified_base 21: mod_base = OTHER; note = 2'-O-methyladenosine-3'-phosphorothioate
  modified_base 22: mod_base = OTHER; note = 2'-O-methyladenosine-3'-phosphorothioate
  modified_base 23: mod_base = OTHER; note = 2'-O-methylguanosine
atttgaatgacttgggccacaag

SEQ ID NO: 1298 - RNA, 23 nt, synthetic construct
  source 1..23: mol_type = other RNA
  modified_base 1: mod_base = OTHER; note = 2'-O-methyladenosine-3'-phosphorothioate
  modified_base 2: mod_base = OTHER; note = 2'-deoxy-2'-fluorouridine-3'-phosphorothioate
  modified_base 3: mod_base = OTHER; note = 2'-O-methyluridine-3'-phosphate
  modified_base 4: mod_base = OTHER; note = 2'-O-methyluridine-3'-phosphate
  modified_base 5: mod_base = OTHER; note = 2'-O-methylcytidine-3'-phosphate
  modified_base 6: mod_base = OTHER; note = 2'-deoxy-2'-fluorouridine-3'-phosphate
  modified_base 7: mod_base = OTHER; note = 2'-O-methyluridine-3'-phosphate
  modified_base 8: mod_base = OTHER; note = 2'-deoxy-2'-fluorouridine-3'-phosphate
  modified_base 9: mod_base = OTHER; note = 2'-deoxy-2'-fluorouridine-3'-phosphate
  modified_base 10: mod_base = OTHER; note = 2'-O-methylguanosine-3'-phosphate
  modified_base 11: mod_base = OTHER; note = 2'-O-methyladenosine-3'-phosphate
  modified_base 12: mod_base = OTHER; note = 2'-O-methyladenosine-3'-phosphate
  modified_base 13: mod_base = OTHER; note = 2'-O-methyluridine-3'-phosphate
  modified_base 14: mod_base = OTHER; note = 2'-deoxy-2'-fluoroguanosine-3'-phosphate
  modified_base 15: mod_base = OTHER; note = 2'-O-methyladenosine-3'-phosphate
  modified_base 16: mod_base = OTHER; note = 2'-deoxy-2'-fluorocytidine-3'-phosphate
  modified_base 17: mod_base = OTHER; note = 2'-O-methyluridine-3'-phosphate
  modified_base 18: mod_base = OTHER; note = 2'-O-methyluridine-3'-phosphate
  modified_base 19: mod_base = OTHER; note = 2'-O-methylguanosine-3'-phosphate
  modified_base 20: mod_base = OTHER; note = 2'-O-methylguanosine-3'-phosphate
  modified_base 21: mod_base = OTHER; note = 2'-O-methylguanosine-3'-phosphorothioate
  modified_base 22: mod_base = OTHER; note = 2'-O-methylcytidine-3'-phosphorothioate
  modified_base 23: mod_base = OTHER; note = 2'-O-methylcytidine
atttcttttgaatgacttgggcc

SEQ ID NO: 1299 - RNA, 23 nt, synthetic construct
  source 1..23: mol_type = other RNA
  modified_base 1: mod_base = OTHER; note = 2'-O-methyladenosine-3'-phosphorothioate
  modified_base 2: mod_base = OTHER; note = 2'-deoxy-2'-fluoroadenosine-3'-phosphorothioate
  modified_base 3: mod_base = OTHER; note = 2'-O-methylcytidine-3'-phosphate
  modified_base 4: mod_base = OTHER; note = 2'-O-methylcytidine-3'-phosphate
  modified_base 5: mod_base = OTHER; note = 2'-O-methyladenosine-3'-phosphate
  modified_base 6: mod_base = OTHER; note = 2'-deoxy-2'-fluorouridine-3'-phosphate
  modified_base 7: mod_base = OTHER; note = 2'-O-methyladenosine-3'-phosphate
  modified_base 8: mod_base = OTHER; note = 2'-deoxy-2'-fluorocytidine-3'-phosphate
  modified_base 9: mod_base = OTHER; note = 2'-deoxy-2'-fluorouridine-3'-phosphate
  modified_base 10: mod_base = OTHER; note = 2'-O-methyluridine-3'-phosphate
  modified_base 11: mod_base = OTHER; note = 2'-O-methyluridine-3'-phosphate
  modified_base 12: mod_base = OTHER; note = 2'-O-methylcytidine-3'-phosphate
  modified_base 13: mod_base = OTHER; note = 2'-O-methyluridine-3'-phosphate
  modified_base 14: mod_base = OTHER; note = 2'-deoxy-2'-fluorouridine-3'-phosphate
  modified_base 15: mod_base = OTHER; note = 2'-O-methyluridine-3'-phosphate
  modified_base 16: mod_base = OTHER; note = 2'-deoxy-2'-fluorouridine-3'-phosphate
  modified_base 17: mod_base = OTHER; note = 2'-O-methylguanosine-3'-phosphate
  modified_base 18: mod_base = OTHER; note = 2'-O-methyladenosine-3'-phosphate
  modified_base 19: mod_base = OTHER; note = 2'-O-methyladenosine-3'-phosphate
  modified_base 20: mod_base = OTHER; note = 2'-O-methyluridine-3'-phosphate
  modified_base 21: mod_base = OTHER; note = 2'-O-methylguanosine-3'-phosphorothioate
  modified_base 22: mod_base = OTHER; note = 2'-O-methyladenosine-3'-phosphorothioate
  modified_base 23: mod_base = OTHER; note = 2'-O-methylcytidine
aaccatactttcttttgaatgac

SEQ ID NO: 1300 - RNA, 23 nt, synthetic construct
  source 1..23: mol_type = other RNA
  modified_base 1: mod_base = OTHER; note = 2'-O-methyladenosine-3'-phosphorothioate
  modified_base 2: mod_base = OTHER; note = 2'-deoxy-2'-fluoroguanosine-3'-phosphorothioate
  modified_base 3: mod_base = OTHER; note = 2'-O-methyladenosine-3'-phosphate
  modified_base 4: mod_base = OTHER; note = 2'-O-methylcytidine-3'-phosphate
  modified_base 5: mod_base = OTHER; note = 2'-O-methyluridine-3'-phosphate
  modified_base 6: mod_base = OTHER; note = 2'-deoxy-2'-fluorocytidine-3'-phosphate
  modified_base 7: mod_base = OTHER; note = 2'-O-methyladenosine-3'-phosphate
  modified_base 8: mod_base = OTHER; note = 2'-deoxy-2'-fluorocytidine-3'-phosphate
  modified_base 9: mod_base = OTHER; note = 2'-deoxy-2'-fluorocytidine-3'-phosphate
  modified_base 10: mod_base = OTHER; note = 2'-O-methyladenosine-3'-phosphate
  modified_base 11: mod_base = OTHER; note = 2'-O-methyluridine-3'-phosphate
  modified_base 12: mod_base = OTHER; note = 2'-O-methyladenosine-3'-phosphate
  modified_base 13: mod_base = OTHER; note = 2'-O-methylcytidine-3'-phosphate
  modified_base 14: mod_base = OTHER; note = 2'-deoxy-2'-fluorouridine-3'-phosphate
  modified_base 15: mod_base = OTHER; note = 2'-O-methyluridine-3'-phosphate
  modified_base 16: mod_base = OTHER; note = 2'-deoxy-2'-fluorouridine-3'-phosphate
  modified_base 17: mod_base = OTHER; note = 2'-O-methylcytidine-3'-phosphate
  modified_base 18: mod_base = OTHER; note = 2'-O-methyluridine-3'-phosphate
  modified_base 19: mod_base = OTHER; note = 2'-O-methyluridine-3'-phosphate
  modified_base 20: mod_base = OTHER; note = 2'-O-methyluridine-3'-phosphate
  modified_base 21: mod_base = OTHER; note = 2'-O-methyluridine-3'-phosphorothioate
  modified_base 22: mod_base = OTHER; note = 2'-O-methylguanosine-3'-phosphorothioate
  modified_base 23: mod_base = OTHER; note = 2'-O-methyladenosine
agactcaccatactttcttttga

SEQ ID NO: 1301 - RNA, 23 nt, synthetic construct
  source 1..23: mol_type = other RNA
  modified_base 1: mod_base = OTHER; note = 2'-O-methyladenosine-3'-phosphorothioate
  modified_base 2: mod_base = OTHER; note = 2'-deoxy-2'-fluoroadenosine-3'-phosphorothioate
  modified_base 3: mod_base = OTHER; note = 2'-O-methyluridine-3'-phosphate
  modified_base 4: mod_base = OTHER; note = 2'-O-methylcytidine-3'-phosphate
  modified_base 5: mod_base = OTHER; note = 2'-O-methyluridine-3'-phosphate
  modified_base 6: mod_base = OTHER; note = 2'-deoxy-2'-fluorouridine-3'-phosphate
  modified_base 7: mod_base = OTHER; note = 2'-O-methylguanosine-3'-phosphate
  modified_base 8: mod_base = OTHER; note = 2'-deoxy-2'-fluoroguanosine-3'-phosphate
  modified_base 9: mod_base = OTHER; note = 2'-deoxy-2'-fluoroguanosine-3'-phosphate
  modified_base 10: mod_base = OTHER; note = 2'-O-methyladenosine-3'-phosphate
  modified_base 11: mod_base = OTHER; note = 2'-O-methylcytidine-3'-phosphate
  modified_base 12: mod_base = OTHER; note = 2'-O-methyluridine-3'-phosphate
  modified_base 13: mod_base = OTHER; note = 2'-O-methylcytidine-3'-phosphate
  modified_base 14: mod_base = OTHER; note = 2'-deoxy-2'-fluoroadenosine-3'-phosphate
  modified_base 15: mod_base = OTHER; note = 2'-O-methylcytidine-3'-phosphate
  modified_base 16: mod_base = OTHER; note = 2'-deoxy-2'-fluorocytidine-3'-phosphate
  modified_base 17: mod_base = OTHER; note = 2'-O-methyladenosine-3'-phosphate
  modified_base 18: mod_base = OTHER; note = 2'-O-methyluridine-3'-phosphate
  modified_base 19: mod_base = OTHER; note = 2'-O-methyladenosine-3'-phosphate
  modified_base 20: mod_base = OTHER; note = 2'-O-methylcytidine-3'-phosphate
  modified_base 21: mod_base = OTHER; note = 2'-O-methyluridine-3'-phosphorothioate
  modified_base 22: mod_base = OTHER; note = 2'-O-methyluridine-3'-phosphorothioate
  modified_base 23: mod_base = OTHER; note = 2'-O-methyluridine
aatcttgggactcaccatacttt

SEQ ID NO: 1302 - RNA, 23 nt, synthetic construct
  source 1..23: mol_type = other RNA
  modified_base 1: mod_base = OTHER; note = 2'-O-methyladenosine-3'-phosphorothioate
  modified_base 2: mod_base = OTHER; note = 2'-deoxy-2'-fluoroadenosine-3'-phosphorothioate
  modified_base 3: mod_base = OTHER; note = 2'-O-methylguanosine-3'-phosphate
  modified_base 4: mod_base = OTHER; note = 2'-O-methylcytidine-3'-phosphate
  modified_base 5: mod_base = OTHER; note = 2'-O-methyladenosine-3'-phosphate
  modified_base 6: mod_base = OTHER; note = 2'-deoxy-2'-fluoroguanosine-3'-phosphate
  modified_base 7: mod_base = OTHER; note = 2'-O-methyladenosine-3'-phosphate
  modified_base 8: mod_base = OTHER; note = 2'-deoxy-2'-fluoroguanosine-3'-phosphate
  modified_base 9: mod_base = OTHER; note = 2'-deoxy-2'-fluoroadenosine-3'-phosphate
  modified_base 10: mod_base = OTHER; note = 2'-O-methyluridine-3'-phosphate
  modified_base 11: mod_base = OTHER; note = 2'-O-methylcytidine-3'-phosphate
  modified_base 12: mod_base = OTHER; note = 2'-O-methyluridine-3'-phosphate
  modified_base 13: mod_base = OTHER; note = 2'-O-methyluridine-3'-phosphate
  modified_base 14: mod_base = OTHER; note = 2'-deoxy-2'-fluoroguanosine-3'-phosphate
  modified_base 15: mod_base = OTHER; note = 2'-O-methylguanosine-3'-phosphate
  modified_base 16: mod_base = OTHER; note = 2'-deoxy-2'-fluoroguanosine-3'-phosphate
  modified_base 17: mod_base = OTHER; note = 2'-O-methyladenosine-3'-phosphate
  modified_base 18: mod_base = OTHER; note = 2'-O-methylcytidine-3'-phosphate
  modified_base 19: mod_base = OTHER; note = 2'-O-methyluridine-3'-phosphate
  modified_base 20: mod_base = OTHER; note = 2'-O-methylcytidine-3'-phosphate
  modified_base 21: mod_base = OTHER; note = 2'-O-methyladenosine-3'-phosphorothioate
  modified_base 22: mod_base = OTHER; note = 2'-O-methylcytidine-3'-phosphorothioate
  modified_base 23: mod_base = OTHER; note = 2'-O-methylcytidine
aagcagagatcttgggactcacc

SEQ ID NO: 1303 - RNA, 23 nt, synthetic construct
  source 1..23: mol_type = other RNA
  modified_base 1: mod_base = OTHER; note = 2'-O-methyladenosine-3'-phosphorothioate
  modified_base 2: mod_base = OTHER; note = 2'-deoxy-2'-fluorouridine-3'-phosphorothioate
  modified_base 3: mod_base = OTHER; note = 2'-O-methylguanosine-3'-phosphate
  modified_base 4: mod_base = OTHER; note = 2'-O-methyluridine-3'-phosphate
  modified_base 5: mod_base = OTHER; note = 2'-O-methylcytidine-3'-phosphate
  modified_base 6: mod_base = OTHER; note = 2'-deoxy-2'-fluorocytidine-3'-phosphate
  modified_base 7: mod_base = OTHER; note = 2'-O-methyladenosine-3'-phosphate
  modified_base 8: mod_base = OTHER; note = 2'-deoxy-2'-fluoroguanosine-3'-phosphate
  modified_base 9: mod_base = OTHER; note = 2'-deoxy-2'-fluorocytidine-3'-phosphate
  modified_base 10: mod_base = OTHER; note = 2'-O-methyladenosine-3'-phosphate
  modified_base 11: mod_base = OTHER; note = 2'-O-methylguanosine-3'-phosphate
  modified_base 12: mod_base = OTHER; note = 2'-O-methyladenosine-3'-phosphate
  modified_base 13: mod_base = OTHER; note = 2'-O-methylguanosine-3'-phosphate
  modified_base 14: mod_base = OTHER; note = 2'-deoxy-2'-fluoroadenosine-3'-phosphate
  modified_base 15: mod_base = OTHER; note = 2'-O-methyluridine-3'-phosphate
  modified_base 16: mod_base = OTHER; note = 2'-deoxy-2'-fluorocytidine-3'-phosphate
  modified_base 17: mod_base = OTHER; note = 2'-O-methyluridine-3'-phosphate
  modified_base 18: mod_base = OTHER; note = 2'-O-methyluridine-3'-phosphate
  modified_base 19: mod_base = OTHER; note = 2'-O-methylguanosine-3'-phosphate
  modified_base 20: mod_base = OTHER; note = 2'-O-methylguanosine-3'-phosphate
  modified_base 21: mod_base = OTHER; note = 2'-O-methylguanosine-3'-phosphorothioate
  modified_base 22: mod_base = OTHER; note = 2'-O-methyladenosine-3'-phosphorothioate
  modified_base 23: mod_base = OTHER; note = 2'-O-methylcytidine
atgtccagcagagatcttgggac

SEQ ID NO: 1304 - RNA, 23 nt, synthetic construct
  source 1..23: mol_type = other RNA
  modified_base 1: mod_base = OTHER; note = 2'-O-methyladenosine-3'-phosphorothioate
  modified_base 2: mod_base = OTHER; note = 2'-deoxy-2'-fluoroguanosine-3'-phosphorothioate
  modified_base 3: mod_base = OTHER; note = 2'-O-methyluridine-3'-phosphate
  modified_base 4: mod_base = OTHER; note = 2'-O-methyluridine-3'-phosphate
  modified_base 5: mod_base = OTHER; note = 2'-O-methylguanosine-3'-phosphate
  modified_base 6: mod_base = OTHER; note = 2'-deoxy-2'-fluoroadenosine-3'-phosphate
  modified_base 7: mod_base = OTHER; note = 2'-O-methyluridine-3'-phosphate
  modified_base 8: mod_base = OTHER; note = 2'-deoxy-2'-fluoroguanosine-3'-phosphate
  modified_base 9: mod_base = OTHER; note = 2'-deoxy-2'-fluorouridine-3'-phosphate
  modified_base 10: mod_base = OTHER; note = 2'-O-methylcytidine-3'-phosphate
  modified_base 11: mod_base = OTHER; note = 2'-O-methylcytidine-3'-phosphate
  modified_base 12: mod_base = OTHER; note = 2'-O-methyladenosine-3'-phosphate
  modified_base 13: mod_base = OTHER; note = 2'-O-methylguanosine-3'-phosphate
  modified_base 14: mod_base = OTHER; note = 2'-deoxy-2'-fluorocytidine-3'-phosphate
  modified_base 15: mod_base = OTHER; note = 2'-O-methyladenosine-3'-phosphate
  modified_base 16: mod_base = OTHER; note = 2'-deoxy-2'-fluoroguanosine-3'-phosphate
  modified_base 17: mod_base = OTHER; note = 2'-O-methyladenosine-3'-phosphate
  modified_base 18: mod_base = OTHER; note = 2'-O-methylguanosine-3'-phosphate
  modified_base 19: mod_base = OTHER; note = 2'-O-methyladenosine-3'-phosphate
  modified_base 20: mod_base = OTHER; note = 2'-O-methyluridine-3'-phosphate
  modified_base 21: mod_base = OTHER; note = 2'-O-methylcytidine-3'-phosphorothioate
  modified_base 22: mod_base = OTHER; note = 2'-O-methyluridine-3'-phosphorothioate
  modified_base 23: mod_base = OTHER; note = 2'-O-methyluridine
agttgatgtccagcagagatctt

SEQ ID NO: 1305 - RNA, 23 nt, synthetic construct
  source 1..23: mol_type = other RNA
  modified_base 1: mod_base = OTHER; note = 2'-O-methyladenosine-3'-phosphorothioate
  modified_base 2: mod_base = OTHER; note = 2'-deoxy-2'-fluoroadenosine-3'-phosphorothioate
  modified_base 3: mod_base = OTHER; note = 2'-O-methylcytidine-3'-phosphate
  modified_base 4: mod_base = OTHER; note = 2'-O-methyladenosine-3'-phosphate
  modified_base 5: mod_base = OTHER; note = 2'-O-methylguanosine-3'-phosphate
  modified_base 6: mod_base = OTHER; note = 2'-deoxy-2'-fluorouridine-3'-phosphate
  modified_base 7: mod_base = OTHER; note = 2'-O-methylguanosine-3'-phosphate
  modified_base 8: mod_base = OTHER; note = 2'-deoxy-2'-fluorouridine-3'-phosphate
  modified_base 9: mod_base = OTHER; note = 2'-deoxy-2'-fluorouridine-3'-phosphate
  modified_base 10: mod_base = OTHER; note = 2'-O-methylguanosine-3'-phosphate
  modified_base 11: mod_base = OTHER; note = 2'-O-methyladenosine-3'-phosphate
  modified_base 12: mod_base = OTHER; note = 2'-O-methyluridine-3'-phosphate
  modified_base 13: mod_base = OTHER; note = 2'-O-methylguanosine-3'-phosphate
  modified_base 14: mod_base = OTHER; note = 2'-deoxy-2'-fluorouridine-3'-phosphate
  modified_base 15: mod_base = OTHER; note = 2'-O-methylcytidine-3'-phosphate
  modified_base 16: mod_base = OTHER; note = 2'-deoxy-2'-fluorocytidine-3'-phosphate
  modified_base 17: mod_base = OTHER; note = 2'-O-methyladenosine-3'-phosphate
  modified_base 18: mod_base = OTHER; note = 2'-O-methylguanosine-3'-phosphate
  modified_base 19: mod_base = OTHER; note = 2'-O-methylcytidine-3'-phosphate
  modified_base 20: mod_base = OTHER; note = 2'-O-methyladenosine-3'-phosphate
  modified_base 21: mod_base = OTHER; note = 2'-O-methylguanosine-3'-phosphorothioate
  modified_base 22: mod_base = OTHER; note = 2'-O-methyladenosine-3'-phosphorothioate
  modified_base 23: mod_base = OTHER; note = 2'-O-methylguanosine
aacagtgttgatgtccagcagag

SEQ ID NO: 1306 - RNA, 23 nt, synthetic construct
  source 1..23: mol_type = other RNA
  modified_base 1: mod_base = OTHER; note = 2'-O-methyladenosine-3'-phosphorothioate
  modified_base 2: mod_base = OTHER; note = 2'-deoxy-2'-fluorocytidine-3'-phosphorothioate
  modified_base 3: mod_base = OTHER; note = 2'-O-methyluridine-3'-phosphate
  modified_base 4: mod_base = OTHER; note = 2'-O-methylguanosine-3'-phosphate
  modified_base 5: mod_base = OTHER; note = 2'-O-methyladenosine-3'-phosphate
  modified_base 6: mod_base = OTHER; note = 2'-deoxy-2'-fluorocytidine-3'-phosphate
  modified_base 7: mod_base = OTHER; note = 2'-O-methylcytidine-3'-phosphate
  modified_base 8: mod_base = OTHER; note = 2'-deoxy-2'-fluoroadenosine-3'-phosphate
  modified_base 9: mod_base = OTHER; note = 2'-deoxy-2'-fluorocytidine-3'-phosphate
  modified_base 10: mod_base = OTHER; note = 2'-O-methyladenosine-3'-phosphate
  modified_base 11: mod_base = OTHER; note = 2'-O-methylguanosine-3'-phosphate
  modified_base 12: mod_base = OTHER; note = 2'-O-methyluridine-3'-phosphate
  modified_base 13: mod_base = OTHER; note = 2'-O-methylguanosine-3'-phosphate
  modified_base 14: mod_base = OTHER; note = 2'-deoxy-2'-fluorouridine-3'-phosphate
  modified_base 15: mod_base = OTHER; note = 2'-O-methyluridine-3'-phosphate
  modified_base 16: mod_base = OTHER; note = 2'-deoxy-2'-fluoroguanosine-3'-phosphate
  modified_base 17: mod_base = OTHER; note = 2'-O-methyladenosine-3'-phosphate
  modified_base 18: mod_base = OTHER; note = 2'-O-methyluridine-3'-phosphate
  modified_base 19: mod_base = OTHER; note = 2'-O-methylguanosine-3'-phosphate
  modified_base 20: mod_base = OTHER; note = 2'-O-methyluridine-3'-phosphate
  modified_base 21: mod_base = OTHER; note = 2'-O-methylcytidine-3'-phosphorothioate
  modified_base 22: mod_base = OTHER; note = 2'-O-methylcytidine-3'-phosphorothioate
  modified_base 23: mod_base = OTHER; note = 2'-O-methyladenosine
actgaccacagtgttgatgtcca

SEQ ID NO: 1307 - RNA, 23 nt, synthetic construct
  source 1..23: mol_type = other RNA
  modified_base 1: mod_base = OTHER; note = 2'-O-methyladenosine-3'-phosphorothioate
  modified_base 2: mod_base = OTHER; note = 2'-deoxy-2'-fluoroadenosine-3'-phosphorothioate
  modified_base 3: mod_base = OTHER; note = 2'-O-methylguanosine-3'-phosphate
  modified_base 4: mod_base = OTHER; note = 2'-O-methylcytidine-3'-phosphate
  modified_base 5: mod_base = OTHER; note = 2'-O-methyluridine-3'-phosphate
  modified_base 6: mod_base = OTHER; note = 2'-deoxy-2'-fluoroguanosine-3'-phosphate
  modified_base 7: mod_base = OTHER; note = 2'-O-methylcytidine-3'-phosphate
  modified_base 8: mod_base = OTHER; note = 2'-deoxy-2'-fluorouridine-3'-phosphate
  modified_base 9: mod_base = OTHER; note = 2'-deoxy-2'-fluorocytidine-3'-phosphate
  modified_base 10: mod_base = OTHER; note = 2'-O-methyluridine-3'-phosphate
  modified_base 11: mod_base = OTHER; note = 2'-O-methylguanosine-3'-phosphate
  modified_base 12: mod_base = OTHER; note = 2'-O-methyladenosine-3'-phosphate
  modified_base 13: mod_base = OTHER; note = 2'-O-methylcytidine-3'-phosphate
  modified_base 14: mod_base = OTHER; note = 2'-deoxy-2'-fluorocytidine-3'-phosphate
  modified_base 15: mod_base = OTHER; note = 2'-O-methyladenosine-3'-phosphate
  modified_base 16: mod_base = OTHER; note = 2'-deoxy-2'-fluorocytidine-3'-phosphate
  modified_base 17: mod_base = OTHER; note = 2'-O-methyladenosine-3'-phosphate
  modified_base 18: mod_base = OTHER; note = 2'-O-methylguanosine-3'-phosphate
  modified_base 19: mod_base = OTHER; note = 2'-O-methyluridine-3'-phosphate
  modified_base 20: mod_base = OTHER; note = 2'-O-methylguanosine-3'-phosphate
  modified_base 21: mod_base = OTHER; note = 2'-O-methyluridine-3'-phosphorothioate
  modified_base 22: mod_base = OTHER; note = 2'-O-methyluridine-3'-phosphorothioate
  modified_base 23: mod_base = OTHER; note = 2'-O-methylguanosine
aagctgctctgaccacagtgttg

SEQ ID NO: 1308 - RNA, 23 nt, synthetic construct
  source 1..23: mol_type = other RNA
  modified_base 1: mod_base = OTHER; note = 2'-O-methyladenosine-3'-phosphorothioate
  modified_base 2: mod_base = OTHER; note = 2'-deoxy-2'-fluoroadenosine-3'-phosphorothioate
  modified_base 3: mod_base = OTHER; note = 2'-O-methyladenosine-3'-phosphate
  modified_base 4: mod_base = OTHER; note = 2'-O-methylguanosine-3'-phosphate
  modified_base 5: mod_base = OTHER; note = 2'-O-methylguanosine-3'-phosphate
  modified_base 6: mod_base = OTHER; note = 2'-deoxy-2'-fluorouridine-3'-phosphate
  modified_base 7: mod_base = OTHER; note = 2'-O-methyluridine-3'-phosphate
  modified_base 8: mod_base = OTHER; note = 2'-deoxy-2'-fluorocytidine-3'-phosphate
  modified_base 9: mod_base = OTHER; note = 2'-deoxy-2'-fluoroadenosine-3'-phosphate
  modified_base 10: mod_base = OTHER; note = 2'-O-methyladenosine-3'-phosphate
  modified_base 11: mod_base = OTHER; note = 2'-O-methyluridine-3'-phosphate
  modified_base 12: mod_base = OTHER; note = 2'-O-methylcytidine-3'-phosphate
  modified_base 13: mod_base = OTHER; note = 2'-O-methylcytidine-3'-phosphate
  modified_base 14: mod_base = OTHER; note = 2'-deoxy-2'-fluoroguanosine-3'-phosphate
  modified_base 15: mod_base = OTHER; note = 2'-O-methyladenosine-3'-phosphate
  modified_base 16: mod_base = OTHER; note = 2'-deoxy-2'-fluoroguanosine-3'-phosphate
  modified_base 17: mod_base = OTHER; note = 2'-O-methyluridine-3'-phosphate
  modified_base 18: mod_base = OTHER; note = 2'-O-methylguanosine-3'-phosphate
  modified_base 19: mod_base = OTHER; note = 2'-O-methyluridine-3'-phosphate
  modified_base 20: mod_base = OTHER; note = 2'-O-methyluridine-3'-phosphate
  modified_base 21: mod_base = OTHER; note = 2'-O-methylguanosine-3'-phosphorothioate
  modified_base 22: mod_base = OTHER; note = 2'-O-methyladenosine-3'-phosphorothioate
  modified_base 23: mod_base = OTHER; note = 2'-O-methyluridine
aaaggttcaatccgagtgttgat

SEQ ID NO: 1309 - RNA, 23 nt, synthetic construct
  source 1..23: mol_type = other RNA
  modified_base 1: mod_base = OTHER; note = 2'-O-methyladenosine-3'-phosphorothioate
  modified_base 2: mod_base = OTHER; note = 2'-deoxy-2'-fluoroguanosine-3'-phosphorothioate
  modified_base 3: mod_base = OTHER; note = 2'-O-methyluridine-3'-phosphate
  modified_base 4: mod_base = OTHER; note = 2'-O-methyladenosine-3'-phosphate
  modified_base 5: mod_base = OTHER; note = 2'-O-methylguanosine-3'-phosphate
  modified_base 6: mod_base = OTHER; note = 2'-deoxy-2'-fluorouridine-3'-phosphate
  modified_base 7: mod_base = OTHER; note = 2'-O-methyladenosine-3'-phosphate
  modified_base 8: mod_base = OTHER; note = 2'-deoxy-2'-fluoroadenosine-3'-phosphate
  modified_base 9: mod_base = OTHER; note = 2'-deoxy-2'-fluoroguanosine-3'-phosphate
  modified_base 10: mod_base = OTHER; note = 2'-O-methylguanosine-3'-phosphate
  modified_base 11: mod_base = OTHER; note = 2'-O-methyluridine-3'-phosphate
  modified_base 12: mod_base = OTHER; note = 2'-O-methyluridine-3'-phosphate
  modified_base 13: mod_base = OTHER; note = 2'-O-methylcytidine-3'-phosphate
  modified_base 14: mod_base = OTHER; note = 2'-deoxy-2'-fluoroadenosine-3'-phosphate
  modified_base 15: mod_base = OTHER; note = 2'-O-methyladenosine-3'-phosphate
  modified_base 16: mod_base = OTHER; note = 2'-deoxy-2'-fluorouridine-3'-phosphate
  modified_base 17: mod_base = OTHER; note = 2'-O-methylcytidine-3'-phosphate
  modified_base 18: mod_base = OTHER; note = 2'-O-methylcytidine-3'-phosphate
  modified_base 19: mod_base = OTHER; note = 2'-O-methylguanosine-3'-phosphate
  modified_base 20: mod_base = OTHER; note = 2'-O-methyladenosine-3'-phosphate
  modified_base 21: mod_base = OTHER; note = 2'-O-methylguanosine-3'-phosphorothioate
  modified_base 22: mod_base = OTHER; note = 2'-O-methyluridine-3'-phosphorothioate
  modified_base 23: mod_base = OTHER; note = 2'-O-methylguanosine
agtagtaaggttcaatccgagtg

SEQ ID NO: 1310 - RNA, 23 nt, synthetic construct
  source 1..23: mol_type = other RNA
  modified_base 1: mod_base = OTHER; note = 2'-O-methyladenosine-3'-phosphorothioate
  modified_base 2: mod_base = OTHER; note = 2'-deoxy-2'-fluoroguanosine-3'-phosphorothioate
  modified_base 3: mod_base = OTHER; note = 2'-O-methyladenosine-3'-phosphate
  modified_base 4: mod_base = OTHER; note = 2'-O-methyluridine-3'-phosphate
  modified_base 5: mod_base = OTHER; note = 2'-O-methylguanosine-3'-phosphate
  modified_base 6: mod_base = OTHER; note = 2'-deoxy-2'-fluorocytidine-3'-phosphate
  modified_base 7: mod_base = OTHER; note = 2'-O-methyluridine-3'-phosphate
  modified_base 8: mod_base = OTHER; note = 2'-deoxy-2'-fluoroguanosine-3'-phosphate
  modified_base 9: mod_base = OTHER; note = 2'-deoxy-2'-fluorouridine-3'-phosphate
  modified_base 10: mod_base = OTHER; note = 2'-O-methyladenosine-3'-phosphate
  modified_base 11: mod_base = OTHER; note = 2'-O-methylguanosine-3'-phosphate
  modified_base 12: mod_base = OTHER; note = 2'-O-methyluridine-3'-phosphate
  modified_base 13: mod_base = OTHER; note = 2'-O-methyladenosine-3'-phosphate
  modified_base 14: mod_base = OTHER; note = 2'-deoxy-2'-fluoroadenosine-3'-phosphate
  modified_base 15: mod_base = OTHER; note = 2'-O-methylguanosine-3'-phosphate
  modified_base 16: mod_base = OTHER; note = 2'-deoxy-2'-fluoroguanosine-3'-phosphate
  modified_base 17: mod_base = OTHER; note = 2'-O-methyluridine-3'-phosphate
  modified_base 18: mod_base = OTHER; note = 2'-O-methyluridine-3'-phosphate
  modified_base 19: mod_base = OTHER; note = 2'-O-methylcytidine-3'-phosphate
  modified_base 20: mod_base = OTHER; note = 2'-O-methyladenosine-3'-phosphate
  modified_base 21: mod_base = OTHER; note = 2'-O-methyladenosine-3'-phosphorothioate
  modified_base 22: mod_base = OTHER; note = 2'-O-methyluridine-3'-phosphorothioate
  modified_base 23: mod_base = OTHER; note = 2'-O-methylcytidine
agatgctgtagtaaggttcaatc

SEQ ID NO: 1311 - RNA, 23 nt, synthetic construct
  source 1..23: mol_type = other RNA
  modified_base 1: mod_base = OTHER; note = 2'-O-methyladenosine-3'-phosphorothioate
  modified_base 2: mod_base = OTHER; note = 2'-deoxy-2'-fluorouridine-3'-phosphorothioate
  modified_base 3: mod_base = OTHER; note = 2'-O-methyluridine-3'-phosphate
  modified_base 4: mod_base = OTHER; note = 2'-O-methyladenosine-3'-phosphate
  modified_base 5: mod_base = OTHER; note = 2'-O-methyluridine-3'-phosphate
  modified_base 6: mod_base = OTHER; note = 2'-deoxy-2'-fluoroadenosine-3'-phosphate
  modified_base 7: mod_base = OTHER; note = 2'-O-methylguanosine-3'-phosphate
  modified_base 8: mod_base = OTHER; note = 2'-deoxy-2'-fluoroadenosine-3'-phosphate
  modified_base 9: mod_base = OTHER; note = 2'-deoxy-2'-fluorouridine-3'-phosphate
  modified_base 10: mod_base = OTHER; note = 2'-O-methylguanosine-3'-phosphate
  modified_base 11: mod_base = OTHER; note = 2'-O-methylcytidine-3'-phosphate
  modified_base 12: mod_base = OTHER; note = 2'-O-methyluridine-3'-phosphate
  modified_base 13: mod_base = OTHER; note = 2'-O-methylguanosine-3'-phosphate
  modified_base 14: mod_base = OTHER; note = 2'-deoxy-2'-fluorouridine-3'-phosphate
  modified_base 15: mod_base = OTHER; note = 2'-O-methyladenosine-3'-phosphate
  modified_base 16: mod_base = OTHER; note = 2'-deoxy-2'-fluoroguanosine-3'-phosphate
  modified_base 17: mod_base = OTHER; note = 2'-O-methyluridine-3'-phosphate
  modified_base 18: mod_base = OTHER; note = 2'-O-methyladenosine-3'-phosphate
  modified_base 19: mod_base = OTHER; note = 2'-O-methyladenosine-3'-phosphate
  modified_base 20: mod_base = OTHER; note = 2'-O-methylguanosine-3'-phosphate
  modified_base 21: mod_base = OTHER; note = 2'-O-methylguanosine-3'-phosphorothioate
  modified_base 22: mod_base = OTHER; note = 2'-O-methyluridine-3'-phosphorothioate
  modified_base 23: mod_base = OTHER; note = 2'-O-methyluridine
attatagatgctgtagtaaggtt

SEQ ID NO: 1312 - RNA, 23 nt, synthetic construct
  source 1..23: mol_type = other RNA
  modified_base 1: mod_base = OTHER; note = 2'-O-methyladenosine-3'-phosphorothioate
  modified_base 2: mod_base = OTHER; note = 2'-deoxy-2'-fluorouridine-3'-phosphorothioate
  modified_base 3: mod_base = OTHER; note = 2'-O-methylguanosine-3'-phosphate
  modified_base 4: mod_base = OTHER; note = 2'-O-methylcytidine-3'-phosphate
  modified_base 5: mod_base = OTHER; note = 2'-O-methyluridine-3'-phosphate
  modified_base 6: mod_base = OTHER; note = 2'-deoxy-2'-fluoroguanosine-3'-phosphate
  modified_base 7: mod_base = OTHER; note = 2'-O-methyluridine-3'-phosphate
  modified_base 8: mod_base = OTHER; note = 2'-deoxy-2'-fluorouridine-3'-phosphate
  modified_base 9: mod_base = OTHER; note = 2'-deoxy-2'-fluoroadenosine-3'-phosphate
  modified_base 10: mod_base = OTHER; note = 2'-O-methyluridine-3'-phosphate
  modified_base 11: mod_base = OTHER; note = 2'-O-methyladenosine-3'-phosphate
  modified_base 12: mod_base = OTHER; note = 2'-O-methylguanosine-3'-phosphate
  modified_base 13: mod_base = OTHER; note = 2'-O-methyladenosine-3'-phosphate
  modified_base 14: mod_base = OTHER; note = 2'-deoxy-2'-fluorouridine-3'-phosphate
  modified_base 15: mod_base = OTHER; note = 2'-O-methylguanosine-3'-phosphate
  modified_base 16: mod_base = OTHER; note = 2'-deoxy-2'-fluorocytidine-3'-phosphate
  modified_base 17: mod_base = OTHER; note = 2'-O-methyluridine-3'-phosphate
  modified_base 18: mod_base = OTHER; note = 2'-O-methylguanosine-3'-phosphate
  modified_base 19: mod_base = OTHER; note = 2'-O-methyluridine-3'-phosphate
  modified_base 20: mod_base = OTHER; note = 2'-O-methyladenosine-3'-phosphate
  modified_base 21: mod_base = OTHER; note = 2'-O-methylguanosine-3'-phosphorothioate
  modified_base 22: mod_base = OTHER; note = 2'-O-methyluridine-3'-phosphorothioate
  modified_base 23: mod_base = OTHER; note = 2'-O-methyladenosine
atgctgttatagatgctgtagta

SEQ ID NO: 1313 - RNA, 23 nt, synthetic construct
  source 1..23: mol_type = other RNA
  modified_base 1: mod_base = OTHER; note = 2'-O-methyladenosine-3'-phosphorothioate
  modified_base 2: mod_base = OTHER; note = 2'-deoxy-2'-fluoroadenosine-3'-phosphorothioate
  modified_base 3: mod_base = OTHER; note = 2'-O-methyladenosine-3'-phosphate
  modified_base 4: mod_base = OTHER; note = 2'-O-methylguanosine-3'-phosphate
  modified_base 5: mod_base = OTHER; note = 2'-O-methylguanosine-3'-phosphate
  modified_base 6: mod_base = OTHER; note = 2'-deoxy-2'-fluoroguanosine-3'-phosphate
  modified_base 7: mod_base = OTHER; note = 2'-O-methylcytidine-3'-phosphate
  modified_base 8: mod_base = OTHER; note = 2'-deoxy-2'-fluorouridine-3'-phosphate
  modified_base 9: mod_base = OTHER; note = 2'-deoxy-2'-fluoroguanosine-3'-phosphate
  modified_base 10: mod_base = OTHER; note = 2'-O-methylcytidine-3'-phosphate
  modified_base 11: mod_base = OTHER; note = 2'-O-methyluridine-3'-phosphate
  modified_base 12: mod_base = OTHER; note = 2'-O-methylguanosine-3'-phosphate
  modified_base 13: mod_base = OTHER; note = 2'-O-methyluridine-3'-phosphate
  modified_base 14: mod_base = OTHER; note = 2'-deoxy-2'-fluorouridine-3'-phosphate
  modified_base 15: mod_base = OTHER; note = 2'-O-methyladenosine-3'-phosphate
  modified_base 16: mod_base = OTHER; note = 2'-deoxy-2'-fluorouridine-3'-phosphate
  modified_base 17: mod_base = OTHER; note = 2'-O-methyladenosine-3'-phosphate
  modified_base 18: mod_base = OTHER; note = 2'-O-methylguanosine-3'-phosphate
  modified_base 19: mod_base = OTHER; note = 2'-O-methyladenosine-3'-phosphate
  modified_base 20: mod_base = OTHER; note = 2'-O-methyluridine-3'-phosphate
  modified_base 21: mod_base = OTHER; note = 2'-O-methylguanosine-3'-phosphorothioate
  modified_base 22: mod_base = OTHER; note = 2'-O-methylcytidine-3'-phosphorothioate
  modified_base 23: mod_base = OTHER; note = 2'-O-methyluridine
aaagggctgctgttatagatgct

SEQ ID NO: 1314 - RNA, 23 nt, synthetic construct
  source 1..23: mol_type = other RNA
  modified_base 1: mod_base = OTHER; note = 2'-O-methyladenosine-3'-phosphorothioate
  modified_base 2: mod_base = OTHER; note = 2'-deoxy-2'-fluoroadenosine-3'-phosphorothioate
  modified_base 3: mod_base = OTHER; note = 2'-O-methyladenosine-3'-phosphate
  modified_base 4: mod_base = OTHER; note = 2'-O-methylguanosine-3'-phosphate
  modified_base 5: mod_base = OTHER; note = 2'-O-methyluridine-3'-phosphate
  modified_base 6: mod_base = OTHER; note = 2'-deoxy-2'-fluorouridine-3'-phosphate
  modified_base 7: mod_base = OTHER; note = 2'-O-methyladenosine-3'-phosphate
  modified_base 8: mod_base = OTHER; note = 2'-deoxy-2'-fluorocytidine-3'-phosphate
  modified_base 9: mod_base = OTHER; note = 2'-deoxy-2'-fluoroadenosine-3'-phosphate
  modified_base 10: mod_base = OTHER; note = 2'-O-methyluridine-3'-phosphate
  modified_base 11: mod_base = OTHER; note = 2'-O-methylguanosine-3'-phosphate
  modified_base 12: mod_base = OTHER; note = 2'-O-methylguanosine-3'-phosphate
  modified_base 13: mod_base = OTHER; note = 2'-O-methylguanosine-3'-phosphate
  modified_base 14: mod_base = OTHER; note = 2'-deoxy-2'-fluorocytidine-3'-phosphate
  modified_base 15: mod_base = OTHER; note = 2'-O-methyluridine-3'-phosphate
  modified_base 16: mod_base = OTHER; note = 2'-deoxy-2'-fluoroguanosine-3'-phosphate
  modified_base 17: mod_base = OTHER; note = 2'-O-methylcytidine-3'-phosphate
  modified_base 18: mod_base = OTHER; note = 2'-O-methyluridine-3'-phosphate
  modified_base 19: mod_base = OTHER; note = 2'-O-methylcytidine-3'-phosphate
  modified_base 20: mod_base = OTHER; note = 2'-O-methyluridine-3'-phosphate
  modified_base 21: mod_base = OTHER; note = 2'-O-methylcytidine-3'-phosphorothioate
  modified_base 22: mod_base = OTHER; note = 2'-O-methylcytidine-3'-phosphorothioate
  modified_base 23: mod_base = OTHER; note = 2'-O-methyluridine
aaagttacatgggctgctctcct

SEQ ID NO: 1315 - RNA, 23 nt, synthetic construct
  source 1..23: mol_type = other RNA
  modified_base 1: mod_base = OTHER; note = 2'-O-methyladenosine-3'-phosphorothioate
  modified_base 2: mod_base = OTHER; note = 2'-deoxy-2'-fluoroguanosine-3'-phosphorothioate
  modified_base 3: mod_base = OTHER; note = 2'-O-methylcytidine-3'-phosphate
  modified_base 4: mod_base = OTHER; note = 2'-O-methyluridine-3'-phosphate
  modified_base 5: mod_base = OTHER; note = 2'-O-methylguanosine-3'-phosphate
  modified_base 6: mod_base = OTHER; note = 2'-deoxy-2'-fluorouridine-3'-phosphate
  modified_base 7: mod_base = OTHER; note = 2'-O-methyladenosine-3'-phosphate
  modified_base 8: mod_base = OTHER; note = 2'-deoxy-2'-fluoroadenosine-3'-phosphate
  modified_base 9: mod_base = OTHER; note = 2'-deoxy-2'-fluoroguanosine-3'-phosphate
  modified_base 10: mod_base = OTHER; note = 2'-O-methyluridine-3'-phosphate
  modified_base 11: mod_base = OTHER; note = 2'-O-methyluridine-3'-phosphate
  modified_base 12: mod_base = OTHER; note = 2'-O-methyladenosine-3'-phosphate
  modified_base 13: mod_base = OTHER; note = 2'-O-methylcytidine-3'-phosphate
  modified_base 14: mod_base = OTHER; note = 2'-deoxy-2'-fluoroadenosine-3'-phosphate
  modified_base 15: mod_base = OTHER; note = 2'-O-methyluridine-3'-phosphate
  modified_base 16: mod_base = OTHER; note = 2'-deoxy-2'-fluoroguanosine-3'-phosphate
  modified_base 17: mod_base = OTHER; note = 2'-O-methylguanosine-3'-phosphate
  modified_base 18: mod_base = OTHER; note = 2'-O-methylguanosine-3'-phosphate
  modified_base 19: mod_base = OTHER; note = 2'-O-methylcytidine-3'-phosphate
  modified_base 20: mod_base = OTHER; note = 2'-O-methyluridine-3'-phosphate
  modified_base 21: mod_base = OTHER; note = 2'-O-methylguanosine-3'-phosphorothioate
  modified_base 22: mod_base = OTHER; note = 2'-O-methylcytidine-3'-phosphorothioate
  modified_base 23: mod_base = OTHER; note = 2'-O-methyluridine
agctgtaagttacatgggctgct

SEQ ID NO: 1316 - RNA, 23 nt, synthetic construct
  source 1..23: mol_type = other RNA
  modified_base 1: mod_base = OTHER; note = 2'-O-methyladenosine-3'-phosphorothioate
  modified_base 2: mod_base = OTHER; note = 2'-deoxy-2'-fluorouridine-3'-phosphorothioate
  modified_base 3: mod_base = OTHER; note = 2'-O-methyluridine-3'-phosphate
  modified_base 4: mod_base = OTHER; note = 2'-O-methyladenosine-3'-phosphate
  modified_base 5: mod_base = OTHER; note = 2'-O-methylcytidine-3'-phosphate
  modified_base 6: mod_base = OTHER; note = 2'-deoxy-2'-fluorouridine-3'-phosphate
  modified_base 7: mod_base = OTHER; note = 2'-O-methylguanosine-3'-phosphate
  modified_base 8: mod_base = OTHER; note = 2'-deoxy-2'-fluoroguanosine-3'-phosphate
  modified_base 9: mod_base = OTHER; note = 2'-deoxy-2'-fluorocytidine-3'-phosphate
  modified_base 10: mod_base = OTHER; note = 2'-O-methyluridine-3'-phosphate
  modified_base 11: mod_base = OTHER; note = 2'-O-methylguanosine-3'-phosphate
  modified_base 12: mod_base = OTHER; note = 2'-O-methyluridine-3'-phosphate
  modified_base 13: mod_base = OTHER; note = 2'-O-methyladenosine-3'-phosphate
  modified_base 14: mod_base = OTHER; note = 2'-deoxy-2'-fluoroadenosine-3'-phosphate
  modified_base 15: mod_base = OTHER; note = 2'-O-methylguanosine-3'-phosphate
  modified_base 16: mod_base = OTHER; note = 2'-deoxy-2'-fluorouridine-3'-phosphate
  modified_base 17: mod_base = OTHER; note = 2'-O-methyluridine-3'-phosphate
  modified_base 18: mod_base = OTHER; note = 2'-O-methyladenosine-3'-phosphate
  modified_base 19: mod_base = OTHER; note = 2'-O-methylcytidine-3'-phosphate
  modified_base 20: mod_base = OTHER; note = 2'-O-methyladenosine-3'-phosphate
  modified_base 21: mod_base = OTHER; note = 2'-O-methyluridine-3'-phosphorothioate
  modified_base 22: mod_base = OTHER; note = 2'-O-methylguanosine-3'-phosphorothioate
  modified_base 23: mod_base = OTHER; note = 2'-O-methylguanosine
attactggctgtaagttacatgg

SEQ ID NO: 1317 - RNA, 23 nt, synthetic construct
  source 1..23: mol_type = other RNA
  modified_base 1: mod_base = OTHER; note = 2'-O-methyladenosine-3'-phosphorothioate
  modified_base 2: mod_base = OTHER; note = 2'-deoxy-2'-fluoroadenosine-3'-phosphorothioate
  modified_base 3: mod_base = OTHER; note = 2'-O-methyladenosine-3'-phosphate
  modified_base 4: mod_base = OTHER; note = 2'-O-methylguanosine-3'-phosphate
  modified_base 5: mod_base = OTHER; note = 2'-O-methyladenosine-3'-phosphate
  modified_base 6: mod_base = OTHER; note = 2'-deoxy-2'-fluoroguanosine-3'-phosphate
  modified_base 7: mod_base = OTHER; note = 2'-O-methyluridine-3'-phosphate
  modified_base 8: mod_base = OTHER; note = 2'-deoxy-2'-fluorouridine-3'-phosphate
  modified_base 9: mod_base = OTHER; note = 2'-deoxy-2'-fluorouridine-3'-phosphate
  modified_base 10: mod_base = OTHER; note = 2'-O-methyladenosine-3'-phosphate
  modified_base 11: mod_base = OTHER; note = 2'-O-methylcytidine-3'-phosphate
  modified_base 12: mod_base = OTHER; note = 2'-O-methyluridine-3'-phosphate
  modified_base 13: mod_base = OTHER; note = 2'-O-methylguanosine-3'-phosphate
  modified_base 14: mod_base = OTHER; note = 2'-deoxy-2'-fluoroguanosine-3'-phosphate
  modified_base 15: mod_base = OTHER; note = 2'-O-methylcytidine-3'-phosphate
  modified_base 16: mod_base = OTHER; note = 2'-deoxy-2'-fluorouridine-3'-phosphate
  modified_base 17: mod_base = OTHER; note = 2'-O-methylguanosine-3'-phosphate
  modified_base 18: mod_base = OTHER; note = 2'-O-methyluridine-3'-phosphate
  modified_base 19: mod_base = OTHER; note = 2'-O-methyladenosine-3'-phosphate
  modified_base 20: mod_base = OTHER; note = 2'-O-methyladenosine-3'-phosphate
  modified_base 21: mod_base = OTHER; note = 2'-O-methylguanosine-3'-phosphorothioate
  modified_base 22: mod_base = OTHER; note = 2'-O-methyluridine-3'-phosphorothioate
  modified_base 23: mod_base = OTHER; note = 2'-O-methyluridine
aaagagtttactggctgtaagtt

SEQ ID NO: 1318 - RNA, 23 nt, synthetic construct
  source 1..23: mol_type = other RNA
  modified_base 1: mod_base = OTHER; note = 2'-O-methyladenosine-3'-phosphorothioate
  modified_base 2: mod_base = OTHER; note = 2'-deoxy-2'-fluoroadenosine-3'-phosphorothioate
  modified_base 3: mod_base = OTHER; note = 2'-O-methyladenosine-3'-phosphate
  modified_base 4: mod_base = OTHER; note = 2'-O-methyluridine-3'-phosphate
  modified_base 5: mod_base = OTHER; note = 2'-O-methylcytidine-3'-phosphate
  modified_base 6: mod_base = OTHER; note = 2'-deoxy-2'-fluorocytidine-3'-phosphate
  modified_base 7: mod_base = OTHER; note = 2'-O-methyladenosine-3'-phosphate
  modified_base 8: mod_base = OTHER; note = 2'-deoxy-2'-fluoroadenosine-3'-phosphate
  modified_base 9: mod_base = OTHER; note = 2'-deoxy-2'-fluoroadenosine-3'-phosphate
  modified_base 10: mod_base = OTHER; note = 2'-O-methyladenosine-3'-phosphate
  modified_base 11: mod_base = OTHER; note = 2'-O-methylguanosine-3'-phosphate
  modified_base 12: mod_base = OTHER; note = 2'-O-methyladenosine-3'-phosphate
  modified_base 13: mod_base = OTHER; note = 2'-O-methylguanosine-3'-phosphate
  modified_base 14: mod_base = OTHER; note = 2'-deoxy-2'-fluorouridine-3'-phosphate
  modified_base 15: mod_base = OTHER; note = 2'-O-methyluridine-3'-phosphate
  modified_base 16: mod_base = OTHER; note = 2'-deoxy-2'-fluorouridine-3'-phosphate
  modified_base 17: mod_base = OTHER; note = 2'-O-methyladenosine-3'-phosphate
  modified_base 18: mod_base = OTHER; note = 2'-O-methylcytidine-3'-phosphate
  modified_base 19: mod_base = OTHER; note = 2'-O-methyluridine-3'-phosphate
  modified_base 20: mod_base = OTHER; note = 2'-O-methylguanosine-3'-phosphate
  modified_base 21: mod_base = OTHER; note = 2'-O-methylguanosine-3'-phosphorothioate
  modified_base 22: mod_base = OTHER; note = 2'-O-methylcytidine-3'-phosphorothioate
  modified_base 23: mod_base = OTHER; note = 2'-O-methyluridine
aaatccaaaagagtttactggct

SEQ ID NO: 1319 - RNA, 23 nt, synthetic construct
  source 1..23: mol_type = other RNA
  modified_base 1: mod_base = OTHER; note = 2'-O-methyladenosine-3'-phosphorothioate
  modified_base 2: mod_base = OTHER; note = 2'-deoxy-2'-fluoroadenosine-3'-phosphorothioate
  modified_base 3: mod_base = OTHER; note = 2'-O-methyluridine-3'-phosphate
  modified_base 4: mod_base = OTHER; note = 2'-O-methyluridine-3'-phosphate
  modified_base 5: mod_base = OTHER; note = 2'-O-methylguanosine-3'-phosphate
  modified_base 6: mod_base = OTHER; note = 2'-deoxy-2'-fluoroguanosine-3'-phosphate
  modified_base 7: mod_base = OTHER; note = 2'-O-methylcytidine-3'-phosphate
  modified_base 8: mod_base = OTHER; note = 2'-deoxy-2'-fluoroadenosine-3'-phosphate
  modified_base 9: mod_base = OTHER; note = 2'-deoxy-2'-fluoroadenosine-3'-phosphate
  modified_base 10: mod_base = OTHER; note = 2'-O-methyladenosine-3'-phosphate
  modified_base 11: mod_base = OTHER; note = 2'-O-methyluridine-3'-phosphate
  modified_base 12: mod_base = OTHER; note = 2'-O-methylcytidine-3'-phosphate
  modified_base 13: mod_base = OTHER; note = 2'-O-methylcytidine-3'-phosphate
  modified_base 14: mod_base = OTHER; note = 2'-deoxy-2'-fluoroadenosine-3'-phosphate
  modified_base 15: mod_base = OTHER; note = 2'-O-methyladenosine-3'-phosphate
  modified_base 16: mod_base = OTHER; note = 2'-deoxy-2'-fluoroadenosine-3'-phosphate
  modified_base 17: mod_base = OTHER; note = 2'-O-methyladenosine-3'-phosphate
  modified_base 18: mod_base = OTHER; note = 2'-O-methylguanosine-3'-phosphate
  modified_base 19: mod_base = OTHER; note = 2'-O-methyladenosine-3'-phosphate
  modified_base 20: mod_base = OTHER; note = 2'-O-methylguanosine-3'-phosphate
  modified_base 21: mod_base = OTHER; note = 2'-O-methyluridine-3'-phosphorothioate
  modified_base 22: mod_base = OTHER; note = 2'-O-methyluridine-3'-phosphorothioate
  modified_base 23: mod_base = OTHER; note = 2'-O-methyluridine
aattggcaaatccaaaagagttt

SEQ ID NO: 1320 - RNA, 23 nt, synthetic construct
  source 1..23: mol_type = other RNA
  modified_base 1: mod_base = OTHER; note = 2'-O-methyladenosine-3'-phosphorothioate
  modified_base 2: mod_base = OTHER; note = 2'-deoxy-2'-fluoroadenosine-3'-phosphorothioate
  modified_base 3: mod_base = OTHER; note = 2'-O-methyladenosine-3'-phosphate
  modified_base 4: mod_base = OTHER; note = 2'-O-methyluridine-3'-phosphate
  modified_base 5: mod_base = OTHER; note = 2'-O-methyladenosine-3'-phosphate
  modified_base 6: mod_base = OTHER; note = 2'-deoxy-2'-fluorouridine-3'-phosphate
  modified_base 7: mod_base = OTHER; note = 2'-O-methyladenosine-3'-phosphate
  modified_base 8: mod_base = OTHER; note = 2'-deoxy-2'-fluorouridine-3'-phosphate
  modified_base 9: mod_base = OTHER; note = 2'-deoxy-2'-fluoroguanosine-3'-phosphate
  modified_base 10: mod_base = OTHER; note = 2'-O-methyladenosine-3'-phosphate
  modified_base 11: mod_base = OTHER; note = 2'-O-methyladenosine-3'-phosphate
  modified_base 12: mod_base = OTHER; note = 2'-O-methyluridine-3'-phosphate
  modified_base 13: mod_base = OTHER; note = 2'-O-methyluridine-3'-phosphate
  modified_base 14: mod_base = OTHER; note = 2'-deoxy-2'-fluoroguanosine-3'-phosphate
  modified_base 15: mod_base = OTHER; note = 2'-O-methylguanosine-3'-phosphate
  modified_base 16: mod_base = OTHER; note = 2'-deoxy-2'-fluorocytidine-3'-phosphate
  modified_base 17: mod_base = OTHER; note = 2'-O-methyladenosine-3'-phosphate
  modified_base 18: mod_base = OTHER; note = 2'-O-methyladenosine-3'-phosphate
  modified_base 19: mod_base = OTHER; note = 2'-O-methyladenosine-3'-phosphate
  modified_base 20: mod_base = OTHER; note = 2'-O-methyluridine-3'-phosphate
  modified_base 21: mod_base = OTHER; note = 2'-O-methylcytidine-3'-phosphorothioate
  modified_base 22: mod_base = OTHER; note = 2'-O-methylcytidine-3'-phosphorothioate
  modified_base 23: mod_base = OTHER; note = 2'-O-methyladenosine
aaatatatgaattggcaaatcca

SEQ ID NO: 1321 - RNA, 23 nt, synthetic construct
  source 1..23: mol_type = other RNA
  modified_base 1: mod_base = OTHER; note = 2'-O-methyladenosine-3'-phosphorothioate
  modified_base 2: mod_base = OTHER; note = 2'-deoxy-2'-fluoroadenosine-3'-phosphorothioate
  modified_base 3: mod_base = OTHER; note = 2'-O-methyluridine-3'-phosphate
  modified_base 4: mod_base = OTHER; note = 2'-O-methylguanosine-3'-phosphate
  modified_base 5: mod_base = OTHER; note = 2'-O-methylcytidine-3'-phosphate
  modified_base 6: mod_base = OTHER; note = 2'-deoxy-2'-fluoroadenosine-3'-phosphate
  modified_base 7: mod_base = OTHER; note = 2'-O-methyluridine-3'-phosphate
  modified_base 8: mod_base = OTHER; note = 2'-deoxy-2'-fluoroguanosine-3'-phosphate
  modified_base 9: mod_base = OTHER; note = 2'-deoxy-2'-fluoroguanosine-3'-phosphate
  modified_base 10: mod_base = OTHER; note = 2'-O-methylcytidine-3'-phosphate
  modified_base 11: mod_base = OTHER; note = 2'-O-methyladenosine-3'-phosphate
  modified_base 12: mod_base = OTHER; note = 2'-O-methyladenosine-3'-phosphate
  modified_base 13: mod_base = OTHER; note = 2'-O-methyluridine-3'-phosphate
  modified_base 14: mod_base = OTHER; note = 2'-deoxy-2'-fluoroadenosine-3'-phosphate
  modified_base 15: mod_base = OTHER; note = 2'-O-methyluridine-3'-phosphate
  modified_base 16: mod_base = OTHER; note = 2'-deoxy-2'-fluoroadenosine-3'-phosphate
  modified_base 17: mod_base = OTHER; note = 2'-O-methyluridine-3'-phosphate
  modified_base 18: mod_base = OTHER; note = 2'-O-methylguanosine-3'-phosphate
  modified_base 19: mod_base = OTHER; note = 2'-O-methyladenosine-3'-phosphate
  modified_base 20: mod_base = OTHER; note = 2'-O-methyladenosine-3'-phosphate
  modified_base 21: mod_base = OTHER; note = 2'-O-methyluridine-3'-phosphorothioate
  modified_base 22: mod_base = OTHER; note = 2'-O-methyluridine-3'-phosphorothioate
  modified_base 23: mod_base = OTHER; note = 2'-O-methylguanosine
aatgcatggcaatatatgaattg

SEQ ID NO: 1322 - RNA, 23 nt, synthetic construct
  source 1..23: mol_type = other RNA
  modified_base 1: mod_base = OTHER; note = 2'-O-methyladenosine-3'-phosphorothioate
  modified_base 2: mod_base = OTHER; note = 2'-deoxy-2'-fluoroguanosine-3'-phosphorothioate
  modified_base 3: mod_base = OTHER; note = 2'-O-methyluridine-3'-phosphate
  modified_base 4: mod_base = OTHER; note = 2'-O-methylguanosine-3'-phosphate
  modified_base 5: mod_base = OTHER; note = 2'-O-methyladenosine-3'-phosphate
  modified_base 6: mod_base = OTHER; note = 2'-deoxy-2'-fluorouridine-3'-phosphate
  modified_base 7: mod_base = OTHER; note = 2'-O-methyladenosine-3'-phosphate
  modified_base 8: mod_base = OTHER; note = 2'-deoxy-2'-fluoroadenosine-3'-phosphate
  modified_base 9: mod_base = OTHER; note = 2'-deoxy-2'-fluorouridine-3'-phosphate
  modified_base 10: mod_base = OTHER; note = 2'-O-methylguanosine-3'-phosphate
  modified_base 11: mod_base = OTHER; note = 2'-O-methylcytidine-3'-phosphate
  modified_base 12: mod_base = OTHER; note = 2'-O-methyladenosine-3'-phosphate
  modified_base 13: mod_base = OTHER; note = 2'-O-methyluridine-3'-phosphate
  modified_base 14: mod_base = OTHER; note = 2'-deoxy-2'-fluoroguanosine-3'-phosphate
  modified_base 15: mod_base = OTHER; note = 2'-O-methylguanosine-3'-phosphate
  modified_base 16: mod_base = OTHER; note = 2'-deoxy-2'-fluorocytidine-3'-phosphate
  modified_base 17: mod_base = OTHER; note = 2'-O-methyladenosine-3'-phosphate
  modified_base 18: mod_base = OTHER; note = 2'-O-methyladenosine-3'-phosphate
  modified_base 19: mod_base = OTHER; note = 2'-O-methyluridine-3'-phosphate
  modified_base 20: mod_base = OTHER; note = 2'-O-methyladenosine-3'-phosphate
  modified_base 21: mod_base = OTHER; note = 2'-O-methyluridine-3'-phosphorothioate
  modified_base 22: mod_base = OTHER; note = 2'-O-methyladenosine-3'-phosphorothioate
  modified_base 23: mod_base = OTHER; note = 2'-O-methyluridine
agtgataatgcatggcaatatat

SEQ ID NO: 1323 - RNA, 23 nt, synthetic construct
  source 1..23: mol_type = other RNA
  modified_base 1: mod_base = OTHER; note = 2'-O-methyladenosine-3'-phosphorothioate
  modified_base 2: mod_base = OTHER; note = 2'-deoxy-2'-fluorouridine-3'-phosphorothioate
  modified_base 3: mod_base = OTHER; note = 2'-O-methyluridine-3'-phosphate
  modified_base 4: mod_base = OTHER; note = 2'-O-methyladenosine-3'-phosphate
  modified_base 5: mod_base = OTHER; note = 2'-O-methylguanosine-3'-phosphate
  modified_base 6: mod_base = OTHER; note = 2'-deoxy-2'-fluorouridine-3'-phosphate
  modified_base 7: mod_base = OTHER; note = 2'-O-methylguanosine-3'-phosphate
  modified_base 8: mod_base = OTHER; note = 2'-deoxy-2'-fluoroguanosine-3'-phosphate
  modified_base 9: mod_base = OTHER; note = 2'-deoxy-2'-fluorouridine-3'-phosphate
  modified_base 10: mod_base = OTHER; note = 2'-O-methylguanosine-3'-phosphate
  modified_base 11: mod_base = OTHER; note = 2'-O-methyluridine-3'-phosphate
  modified_base 12: mod_base = OTHER; note = 2'-O-methylguanosine-3'-phosphate
  modified_base 13: mod_base = OTHER; note = 2'-O-methyladenosine-3'-phosphate
  modified_base 14: mod_base = OTHER; note = 2'-deoxy-2'-fluorouridine-3'-phosphate
  modified_base 15: mod_base = OTHER; note = 2'-O-methyladenosine-3'-phosphate
  modified_base 16: mod_base = OTHER; note = 2'-deoxy-2'-fluoroadenosine-3'-phosphate
  modified_base 17: mod_base = OTHER; note = 2'-O-methyluridine-3'-phosphate
  modified_base 18: mod_base = OTHER; note = 2'-O-methylguanosine-3'-phosphate
  modified_base 19: mod_base = OTHER; note = 2'-O-methylcytidine-3'-phosphate
  modified_base 20: mod_base = OTHER; note = 2'-O-methyladenosine-3'-phosphate
  modified_base 21: mod_base = OTHER; note = 2'-O-methyluridine-3'-phosphorothioate
  modified_base 22: mod_base = OTHER; note = 2'-O-methylguanosine-3'-phosphorothioate
  modified_base 23: mod_base = OTHER; note = 2'-O-methylguanosine
attagtggtgtgataatgcatgg

SEQ ID NO: 1324 - RNA, 23 nt, synthetic construct
  source 1..23: mol_type = other RNA
  modified_base 1: mod_base = OTHER; note = 2'-O-methyladenosine-3'-phosphorothioate
  modified_base 2: mod_base = OTHER; note = 2'-deoxy-2'-fluoroadenosine-3'-phosphorothioate
  modified_base 3: mod_base = OTHER; note = 2'-O-methyladenosine-3'-phosphate
  modified_base 4: mod_base = OTHER; note = 2'-O-methylguanosine-3'-phosphate
  modified_base 5: mod_base = OTHER; note = 2'-O-methyluridine-3'-phosphate
  modified_base 6: mod_base = OTHER; note = 2'-deoxy-2'-fluorocytidine-3'-phosphate
  modified_base 7: mod_base = OTHER; note = 2'-O-methyladenosine-3'-phosphate
  modified_base 8: mod_base = OTHER; note = 2'-deoxy-2'-fluorouridine-3'-phosphate
  modified_base 9: mod_base = OTHER; note = 2'-deoxy-2'-fluorouridine-3'-phosphate
  modified_base 10: mod_base = OTHER; note = 2'-O-methyladenosine-3'-phosphate
  modified_base 11: mod_base = OTHER; note = 2'-O-methylguanosine-3'-phosphate
  modified_base 12: mod_base = OTHER; note = 2'-O-methyluridine-3'-phosphate
  modified_base 13: mod_base = OTHER; note = 2'-O-methylguanosine-3'-phosphate
  modified_base 14: mod_base = OTHER; note = 2'-deoxy-2'-fluoroguanosine-3'-phosphate
  modified_base 15: mod_base = OTHER; note = 2'-O-methyluridine-3'-phosphate
  modified_base 16: mod_base = OTHER; note = 2'-deoxy-2'-fluoroguanosine-3'-phosphate
  modified_base 17: mod_base = OTHER; note = 2'-O-methyluridine-3'-phosphate
  modified_base 18: mod_base = OTHER; note = 2'-O-methylguanosine-3'-phosphate
  modified_base 19: mod_base = OTHER; note = 2'-O-methyladenosine-3'-phosphate
  modified_base 20: mod_base = OTHER; note = 2'-O-methyluridine-3'-phosphate
  modified_base 21: mod_base = OTHER; note = 2'-O-methyladenosine-3'-phosphorothioate
  modified_base 22: mod_base = OTHER; note = 2'-O-methyladenosine-3'-phosphorothioate
  modified_base 23: mod_base = OTHER; note = 2'-O-methyluridine
aaagtcattagtggtgtgataat

SEQ ID NO: 1325 - RNA, 23 nt, synthetic construct
  source 1..23: mol_type = other RNA
  modified_base 1: mod_base = OTHER; note = 2'-O-methyladenosine-3'-phosphorothioate
  modified_base 2: mod_base = OTHER; note = 2'-deoxy-2'-fluoroguanosine-3'-phosphorothioate
  modified_base 3: mod_base = OTHER; note = 2'-O-methylcytidine-3'-phosphate
  modified_base 4: mod_base = OTHER; note = 2'-O-methyladenosine-3'-phosphate
  modified_base 5: mod_base = OTHER; note = 2'-O-methylcytidine-3'-phosphate
  modified_base 6: mod_base = OTHER; note = 2'-deoxy-2'-fluorouridine-3'-phosphate
  modified_base 7: mod_base = OTHER; note = 2'-O-methyladenosine-3'-phosphate
  modified_base 8: mod_base = OTHER; note = 2'-deoxy-2'-fluoroadenosine-3'-phosphate
  modified_base 9: mod_base = OTHER; note = 2'-deoxy-2'-fluoroguanosine-3'-phosphate
  modified_base 10: mod_base = OTHER; note = 2'-O-methyluridine-3'-phosphate
  modified_base 11: mod_base = OTHER; note = 2'-O-methylcytidine-3'-phosphate
  modified_base 12: mod_base = OTHER; note = 2'-O-methyladenosine-3'-phosphate
  modified_base 13: mod_base = OTHER; note = 2'-O-methyluridine-3'-phosphate
  modified_base 14: mod_base = OTHER; note = 2'-deoxy-2'-fluorouridine-3'-phosphate
  modified_base 15: mod_base = OTHER; note = 2'-O-methyladenosine-3'-phosphate
  modified_base 16: mod_base = OTHER; note = 2'-deoxy-2'-fluoroguanosine-3'-phosphate
  modified_base 17: mod_base = OTHER; note = 2'-O-methyluridine-3'-phosphate
  modified_base 18: mod_base = OTHER; note = 2'-O-methylguanosine-3'-phosphate
  modified_base 19: mod_base = OTHER; note = 2'-O-methylguanosine-3'-phosphate
  modified_base 20: mod_base = OTHER; note = 2'-O-methyluridine-3'-phosphate
  modified_base 21: mod_base = OTHER; note = 2'-O-methylguanosine-3'-phosphorothioate
  modified_base 22: mod_base = OTHER; note = 2'-O-methyluridine-3'-phosphorothioate
  modified_base 23: mod_base = OTHER; note = 2'-O-methylguanosine
agcactaagtcattagtggtgtg

SEQ ID NO: 1326 - RNA, 23 nt, synthetic construct
  source 1..23: mol_type = other RNA
  modified_base 1: mod_base = OTHER; note = 2'-O-methyladenosine-3'-phosphorothioate
  modified_base 2: mod_base = OTHER; note = 2'-deoxy-2'-fluorouridine-3'-phosphorothioate
  modified_base 3: mod_base = OTHER; note = 2'-O-methyladenosine-3'-phosphate
  modified_base 4: mod_base = OTHER; note = 2'-O-methyluridine-3'-phosphate
  modified_base 5: mod_base = OTHER; note = 2'-O-methyluridine-3'-phosphate
  modified_base 6: mod_base = OTHER; note = 2'-deoxy-2'-fluorocytidine-3'-phosphate
  modified_base 7: mod_base = OTHER; note = 2'-O-methylcytidine-3'-phosphate
  modified_base 8: mod_base = OTHER; note = 2'-deoxy-2'-fluorouridine-3'-phosphate
  modified_base 9: mod_base = OTHER; note = 2'-deoxy-2'-fluoroguanosine-3'-phosphate
  modified_base 10: mod_base = OTHER; note = 2'-O-methylcytidine-3'-phosphate
  modified_base 11: mod_base = OTHER; note = 2'-O-methyladenosine-3'-phosphate
  modified_base 12: mod_base = OTHER; note = 2'-O-methylcytidine-3'-phosphate
  modified_base 13: mod_base = OTHER; note = 2'-O-methyluridine-3'-phosphate
  modified_base 14: mod_base = OTHER; note = 2'-deoxy-2'-fluoroadenosine-3'-phosphate
  modified_base 15: mod_base = OTHER; note = 2'-O-methyladenosine-3'-phosphate
  modified_base 16: mod_base = OTHER; note = 2'-deoxy-2'-fluoroguanosine-3'-phosphate
  modified_base 17: mod_base = OTHER; note = 2'-O-methyluridine-3'-phosphate
  modified_base 18: mod_base = OTHER; note = 2'-O-methylcytidine-3'-phosphate
  modified_base 19: mod_base = OTHER; note = 2'-O-methyladenosine-3'-phosphate
  modified_base 20: mod_base = OTHER; note = 2'-O-methyluridine-3'-phosphate
  modified_base 21: mod_base = OTHER; note = 2'-O-methyluridine-3'-phosphorothioate
  modified_base 22: mod_base = OTHER; note = 2'-O-methyladenosine-3'-phosphorothioate
  modified_base 23: mod_base = OTHER; note = 2'-O-methylguanosine
atattcctgcactaagtcattag

SEQ ID NO: 1327 - RNA, 23 nt, synthetic construct
  source 1..23: mol_type = other RNA
  modified_base 1: mod_base = OTHER; note = 2'-O-methyladenosine-3'-phosphorothioate
  modified_base 2: mod_base = OTHER; note = 2'-deoxy-2'-fluorocytidine-3'-phosphorothioate
  modified_base 3: mod_base = OTHER; note = 2'-O-methyluridine-3'-phosphate
  modified_base 4: mod_base = OTHER; note = 2'-O-methylguanosine-3'-phosphate
  modified_base 5: mod_base = OTHER; note = 2'-O-methyluridine-3'-phosphate
  modified_base 6: mod_base = OTHER; note = 2'-deoxy-2'-fluorocytidine-3'-phosphate
  modified_base 7: mod_base = OTHER; note = 2'-O-methyladenosine-3'-phosphate
  modified_base 8: mod_base = OTHER; note = 2'-deoxy-2'-fluorouridine-3'-phosphate
  modified_base 9: mod_base = OTHER; note = 2'-deoxy-2'-fluoroadenosine-3'-phosphate
  modified_base 10: mod_base = OTHER; note = 2'-O-methyluridine-3'-phosphate
  modified_base 11: mod_base = OTHER; note = 2'-O-methyluridine-3'-phosphate
  modified_base 12: mod_base = OTHER; note = 2'-O-methylcytidine-3'-phosphate
  modified_base 13: mod_base = OTHER; note = 2'-O-methylcytidine-3'-phosphate
  modified_base 14: mod_base = OTHER; note = 2'-deoxy-2'-fluorouridine-3'-phosphate
  modified_base 15: mod_base = OTHER; note = 2'-O-methylguanosine-3'-phosphate
  modified_base 16: mod_base = OTHER; note = 2'-deoxy-2'-fluorocytidine-3'-phosphate
  modified_base 17: mod_base = OTHER; note = 2'-O-methyladenosine-3'-phosphate
  modified_base 18: mod_base = OTHER; note = 2'-O-methylcytidine-3'-phosphate
  modified_base 19: mod_base = OTHER; note = 2'-O-methyluridine-3'-phosphate
  modified_base 20: mod_base = OTHER; note = 2'-O-methyladenosine-3'-phosphate
  modified_base 21: mod_base = OTHER; note = 2'-O-methyladenosine-3'-phosphorothioate
  modified_base 22: mod_base = OTHER; note = 2'-O-methylguanosine-3'-phosphorothioate
  modified_base 23: mod_base = OTHER; note = 2'-O-methyluridine
actgtcatattcctgcactaagt

SEQ ID NO: 1328 - RNA, 23 nt, synthetic construct
  source 1..23: mol_type = other RNA
  modified_base 1: mod_base = OTHER; note = 2'-O-methyladenosine-3'-phosphorothioate
  modified_base 2: mod_base = OTHER; note = 2'-deoxy-2'-fluoroadenosine-3'-phosphorothioate
  modified_base 3: mod_base = OTHER; note = 2'-O-methyladenosine-3'-phosphate
  modified_base 4: mod_base = OTHER; note = 2'-O-methylguanosine-3'-phosphate
  modified_base 5: mod_base = OTHER; note = 2'-O-methyluridine-3'-phosphate
  modified_base 6: mod_base = OTHER; note = 2'-deoxy-2'-fluoroguanosine-3'-phosphate
  modified_base 7: mod_base = OTHER; note = 2'-O-methylcytidine-3'-phosphate
  modified_base 8: mod_base = OTHER; note = 2'-deoxy-2'-fluorouridine-3'-phosphate
  modified_base 9: mod_base = OTHER; note = 2'-deoxy-2'-fluoroguanosine-3'-phosphate
  modified_base 10: mod_base = OTHER; note = 2'-O-methyluridine-3'-phosphate
  modified_base 11: mod_base = OTHER; note = 2'-O-methylcytidine-3'-phosphate
  modified_base 12: mod_base = OTHER; note = 2'-O-methyladenosine-3'-phosphate
  modified_base 13: mod_base = OTHER; note = 2'-O-methyluridine-3'-phosphate
  modified_base 14: mod_base = OTHER; note = 2'-deoxy-2'-fluoroadenosine-3'-phosphate
  modified_base 15: mod_base = OTHER; note = 2'-O-methyluridine-3'-phosphate
  modified_base 16: mod_base = OTHER; note = 2'-deoxy-2'-fluorouridine-3'-phosphate
  modified_base 17: mod_base = OTHER; note = 2'-O-methylcytidine-3'-phosphate
  modified_base 18: mod_base = OTHER; note = 2'-O-methylcytidine-3'-phosphate
  modified_base 19: mod_base = OTHER; note = 2'-O-methyluridine-3'-phosphate
  modified_base 20: mod_base = OTHER; note = 2'-O-methylguanosine-3'-phosphate
  modified_base 21: mod_base = OTHER; note = 2'-O-methylcytidine-3'-phosphorothioate
  modified_base 22: mod_base = OTHER; note = 2'-O-methyladenosine-3'-phosphorothioate
  modified_base 23: mod_base = OTHER; note = 2'-O-methylcytidine
aaagtgctgtcatattcctgcac

SEQ ID NO: 1329 - RNA, 23 nt, synthetic construct
  source 1..23: mol_type = other RNA
  modified_base 1: mod_base = OTHER; note = 2'-O-methyladenosine-3'-phosphorothioate
  modified_base 2: mod_base = OTHER; note = 2'-deoxy-2'-fluorouridine-3'-phosphorothioate
  modified_base 3: mod_base = OTHER; note = 2'-O-methyluridine-3'-phosphate
  modified_base 4: mod_base = OTHER; note = 2'-O-methylguanosine-3'-phosphate
  modified_base 5: mod_base = OTHER; note = 2'-O-methylguanosine-3'-phosphate
  modified_base 6: mod_base = OTHER; note = 2'-deoxy-2'-fluorocytidine-3'-phosphate
  modified_base 7: mod_base = OTHER; note = 2'-O-methyluridine-3'-phosphate
  modified_base 8: mod_base = OTHER; note = 2'-deoxy-2'-fluoroguanosine-3'-phosphate
  modified_base 9: mod_base = OTHER; note = 2'-deoxy-2'-fluoroadenosine-3'-phosphate
  modified_base 10: mod_base = OTHER; note = 2'-O-methyladenosine-3'-phosphate
  modified_base 11: mod_base = OTHER; note = 2'-O-methylguanosine-3'-phosphate
  modified_base 12: mod_base = OTHER; note = 2'-O-methyluridine-3'-phosphate
  modified_base 13: mod_base = OTHER; note = 2'-O-methylguanosine-3'-phosphate
  modified_base 14: mod_base = OTHER; note = 2'-deoxy-2'-fluorocytidine-3'-phosphate
  modified_base 15: mod_base = OTHER; note = 2'-O-methyluridine-3'-phosphate
  modified_base 16: mod_base = OTHER; note = 2'-deoxy-2'-fluoroguanosine-3'-phosphate
  modified_base 17: mod_base = OTHER; note = 2'-O-methyluridine-3'-phosphate
  modified_base 18: mod_base = OTHER; note = 2'-O-methylcytidine-3'-phosphate
  modified_base 19: mod_base = OTHER; note = 2'-O-methyladenosine-3'-phosphate
  modified_base 20: mod_base = OTHER; note = 2'-O-methyluridine-3'-phosphate
  modified_base 21: mod_base = OTHER; note = 2'-O-methyladenosine-3'-phosphorothioate
  modified_base 22: mod_base = OTHER; note = 2'-O-methyluridine-3'-phosphorothioate
  modified_base 23: mod_base = OTHER; note = 2'-O-methyluridine
attggctgaagtgctgtcatatt

SEQ ID NO: 1330 - RNA, 23 nt, synthetic construct
  source 1..23: mol_type = other RNA
  modified_base 1: mod_base = OTHER; note = 2'-O-methyladenosine-3'-phosphorothioate
  modified_base 2: mod_base = OTHER; note = 2'-deoxy-2'-fluoroguanosine-3'-phosphorothioate
  modified_base 3: mod_base = OTHER; note = 2'-O-methyladenosine-3'-phosphate
  modified_base 4: mod_base = OTHER; note = 2'-O-methyladenosine-3'-phosphate
  modified_base 5: mod_base = OTHER; note = 2'-O-methyluridine-3'-phosphate
  modified_base 6: mod_base = OTHER; note = 2'-deoxy-2'-fluorocytidine-3'-phosphate
  modified_base 7: mod_base = OTHER; note = 2'-O-methyluridine-3'-phosphate
  modified_base 8: mod_base = OTHER; note = 2'-deoxy-2'-fluoroguanosine-3'-phosphate
  modified_base 9: mod_base = OTHER; note = 2'-deoxy-2'-fluorocytidine-3'-phosphate
  modified_base 10: mod_base = OTHER; note = 2'-O-methyluridine-3'-phosphate
  modified_base 11: mod_base = OTHER; note = 2'-O-methyluridine-3'-phosphate
  modified_base 12: mod_base = OTHER; note = 2'-O-methylguanosine-3'-phosphate
  modified_base 13: mod_base = OTHER; note = 2'-O-methylguanosine-3'-phosphate
  modified_base 14: mod_base = OTHER; note = 2'-deoxy-2'-fluorocytidine-3'-phosphate
  modified_base 15: mod_base = OTHER; note = 2'-O-methyluridine-3'-phosphate
  modified_base 16: mod_base = OTHER; note = 2'-deoxy-2'-fluoroguanosine-3'-phosphate
  modified_base 17: mod_base = OTHER; note = 2'-O-methyladenosine-3'-phosphate
  modified_base 18: mod_base = OTHER; note = 2'-O-methyladenosine-3'-phosphate
  modified_base 19: mod_base = OTHER; note = 2'-O-methylguanosine-3'-phosphate
  modified_base 20: mod_base = OTHER; note = 2'-O-methyluridine-3'-phosphate
  modified_base 21: mod_base = OTHER; note = 2'-O-methylguanosine-3'-phosphorothioate
  modified_base 22: mod_base = OTHER; note = 2'-O-methylcytidine-3'-phosphorothioate
  modified_base 23: mod_base = OTHER; note = 2'-O-methyluridine
agaatctgcttggctgaagtgct

SEQ ID NO: 1331 - RNA, 23 nt, synthetic construct
  source 1..23: mol_type = other RNA
  modified_base 1: mod_base = OTHER; note = 2'-O-methyladenosine-3'-phosphorothioate
  modified_base 2: mod_base = OTHER; note = 2'-deoxy-2'-fluoroguanosine-3'-phosphorothioate
  modified_base 3: mod_base = OTHER; note = 2'-O-methyladenosine-3'-phosphate
  modified_base 4: mod_base = OTHER; note = 2'-O-methylcytidine-3'-phosphate
  modified_base 5: mod_base = OTHER; note = 2'-O-methyluridine-3'-phosphate
  modified_base 6: mod_base = OTHER; note = 2'-deoxy-2'-fluoroguanosine-3'-phosphate
  modified_base 7: mod_base = OTHER; note = 2'-O-methylguanosine-3'-phosphate
  modified_base 8: mod_base = OTHER; note = 2'-deoxy-2'-fluoroadenosine-3'-phosphate
  modified_base 9: mod_base = OTHER; note = 2'-deoxy-2'-fluoroadenosine-3'-phosphate
  modified_base 10: mod_base = OTHER; note = 2'-O-methyluridine-3'-phosphate
  modified_base 11: mod_base = OTHER; note = 2'-O-methylcytidine-3'-phosphate
  modified_base 12: mod_base = OTHER; note = 2'-O-methyluridine-3'-phosphate
  modified_base 13: mod_base = OTHER; note = 2'-O-methylguanosine-3'-phosphate
  modified_base 14: mod_base = OTHER; note = 2'-deoxy-2'-fluorocytidine-3'-phosphate
  modified_base 15: mod_base = OTHER; note = 2'-O-methyluridine-3'-phosphate
  modified_base 16: mod_base = OTHER; note = 2'-deoxy-2'-fluorouridine-3'-phosphate
  modified_base 17: mod_base = OTHER; note = 2'-O-methylguanosine-3'-phosphate
  modified_base 18: mod_base = OTHER; note = 2'-O-methylguanosine-3'-phosphate
  modified_base 19: mod_base = OTHER; note = 2'-O-methylcytidine-3'-phosphate
  modified_base 20: mod_base = OTHER; note = 2'-O-methyluridine-3'-phosphate
  modified_base 21: mod_base = OTHER; note = 2'-O-methylguanosine-3'-phosphorothioate
  modified_base 22: mod_base = OTHER; note = 2'-O-methyladenosine-3'-phosphorothioate
  modified_base 23: mod_base = OTHER; note = 2'-O-methyladenosine
agactggaatctgcttggctgaa

SEQ ID NO: 1332 - RNA, 23 nt, synthetic construct
  source 1..23: mol_type = other RNA
  modified_base 1: mod_base = OTHER; note = 2'-O-methyladenosine-3'-phosphorothioate
  modified_base 2: mod_base = OTHER; note = 2'-deoxy-2'-fluorocytidine-3'-phosphorothioate
  modified_base 3: mod_base = OTHER; note = 2'-O-methyluridine-3'-phosphate
  modified_base 4: mod_base = OTHER; note = 2'-O-methylcytidine-3'-phosphate
  modified_base 5: mod_base = OTHER; note = 2'-O-methylcytidine-3'-phosphate
  modified_base 6: mod_base = OTHER; note = 2'-deoxy-2'-fluoroadenosine-3'-phosphate
  modified_base 7: mod_base = OTHER; note = 2'-O-methyluridine-3'-phosphate
  modified_base 8: mod_base = OTHER; note = 2'-deoxy-2'-fluoroguanosine-3'-phosphate
  modified_base 9: mod_base = OTHER; note = 2'-deoxy-2'-fluoroadenosine-3'-phosphate
  modified_base 10: mod_base = OTHER; note = 2'-O-methylcytidine-3'-phosphate
  modified_base 11: mod_base = OTHER; note = 2'-O-methyluridine-3'-phosphate
  modified_base 12: mod_base = OTHER; note = 2'-O-methyluridine-3'-phosphate
  modified_base 13: mod_base = OTHER; note = 2'-O-methyluridine-3'-phosphate
  modified_base 14: mod_base = OTHER; note = 2'-deoxy-2'-fluoroadenosine-3'-phosphate
  modified_base 15: mod_base = OTHER; note = 2'-O-methyladenosine-3'-phosphate
  modified_base 16: mod_base = OTHER; note = 2'-deoxy-2'-fluoroadenosine-3'-phosphate
  modified_base 17: mod_base = OTHER; note = 2'-O-methylcytidine-3'-phosphate
  modified_base 18: mod_base = OTHER; note = 2'-O-methylguanosine-3'-phosphate
  modified_base 19: mod_base = OTHER; note = 2'-O-methylguanosine-3'-phosphate
  modified_base 20: mod_base = OTHER; note = 2'-O-methyladenosine-3'-phosphate
  modified_base 21: mod_base = OTHER; note = 2'-O-methylguanosine-3'-phosphorothioate
  modified_base 22: mod_base = OTHER; note = 2'-O-methylguanosine-3'-phosphorothioate
  modified_base 23: mod_base = OTHER; note = 2'-O-methylguanosine
actccatgactttaaacggaggg

SEQ ID NO: 1333 - RNA, 23 nt, synthetic construct
  source 1..23: mol_type = other RNA
  modified_base 1: mod_base = OTHER; note = 2'-O-methyladenosine-3'-phosphorothioate
  modified_base 2: mod_base = OTHER; note = 2'-deoxy-2'-fluorocytidine-3'-phosphorothioate
  modified_base 3: mod_base = OTHER; note = 2'-O-methylcytidine-3'-phosphate
  modified_base 4: mod_base = OTHER; note = 2'-O-methyluridine-3'-phosphate
  modified_base 5: mod_base = OTHER; note = 2'-O-methyladenosine-3'-phosphate
  modified_base 6: mod_base = OTHER; note = 2'-deoxy-2'-fluorouridine-3'-phosphate
  modified_base 7: mod_base = OTHER; note = 2'-O-methyladenosine-3'-phosphate
  modified_base 8: mod_base = OTHER; note = 2'-deoxy-2'-fluoroguanosine-3'-phosphate
  modified_base 9: mod_base = OTHER; note = 2'-deoxy-2'-fluorocytidine-3'-phosphate
  modified_base 10: mod_base = OTHER; note = 2'-O-methylcytidine-3'-phosphate
  modified_base 11: mod_base = OTHER; note = 2'-O-methyluridine-3'-phosphate
  modified_base 12: mod_base = OTHER; note = 2'-O-methylcytidine-3'-phosphate
  modified_base 13: mod_base = OTHER; note = 2'-O-methylcytidine-3'-phosphate
  modified_base 14: mod_base = OTHER; note = 2'-deoxy-2'-fluoroadenosine-3'-phosphate
  modified_base 15: mod_base = OTHER; note = 2'-O-methyluridine-3'-phosphate
  modified_base 16: mod_base = OTHER; note = 2'-deoxy-2'-fluoroguanosine-3'-phosphate
  modified_base 17: mod_base = OTHER; note = 2'-O-methyladenosine-3'-phosphate
  modified_base 18: mod_base = OTHER; note = 2'-O-methylcytidine-3'-phosphate
  modified_base 19: mod_base = OTHER; note = 2'-O-methyluridine-3'-phosphate
  modified_base 20: mod_base = OTHER; note = 2'-O-methyluridine-3'-phosphate
  modified_base 21: mod_base = OTHER; note = 2'-O-methyluridine-3'-phosphorothioate
  modified_base 22: mod_base = OTHER; note = 2'-O-methyladenosine-3'-phosphorothioate
  modified_base 23: mod_base = OTHER; note = 2'-O-methyladenosine
acctatagcctccatgactttaa

SEQ ID NO: 1334 - RNA, 23 nt, synthetic construct
  source 1..23: mol_type = other RNA
  modified_base 1: mod_base = OTHER; note = 2'-O-methyladenosine-3'-phosphorothioate
  modified_base 2: mod_base = OTHER; note = 2'-deoxy-2'-fluorocytidine-3'-phosphorothioate
  modified_base 3: mod_base = OTHER; note = 2'-O-methyladenosine-3'-phosphate
  modified_base 4: mod_base = OTHER; note = 2'-O-methyluridine-3'-phosphate
  modified_base 5: mod_base = OTHER; note = 2'-O-methyladenosine-3'-phosphate
  modified_base 6: mod_base = OTHER; note = 2'-deoxy-2'-fluoroadenosine-3'-phosphate
  modified_base 7: mod_base = OTHER; note = 2'-O-methylguanosine-3'-phosphate
  modified_base 8: mod_base = OTHER; note = 2'-deoxy-2'-fluoroadenosine-3'-phosphate
  modified_base 9: mod_base = OTHER; note = 2'-deoxy-2'-fluorouridine-3'-phosphate
  modified_base 10: mod_base = OTHER; note = 2'-O-methylcytidine-3'-phosphate
  modified_base 11: mod_base = OTHER; note = 2'-O-methylcytidine-3'-phosphate
  modified_base 12: mod_base = OTHER; note = 2'-O-methyluridine-3'-phosphate
  modified_base 13: mod_base = OTHER; note = 2'-O-methyladenosine-3'-phosphate
  modified_base 14: mod_base = OTHER; note = 2'-deoxy-2'-fluorouridine-3'-phosphate
  modified_base 15: mod_base = OTHER; note = 2'-O-methyladenosine-3'-phosphate
  modified_base 16: mod_base = OTHER; note = 2'-deoxy-2'-fluoroguanosine-3'-phosphate
  modified_base 17: mod_base = OTHER; note = 2'-O-methylcytidine-3'-phosphate
  modified_base 18: mod_base = OTHER; note = 2'-O-methylcytidine-3'-phosphate
  modified_base 19: mod_base = OTHER; note = 2'-O-methyluridine-3'-phosphate
  modified_base 20: mod_base = OTHER; note = 2'-O-methylcytidine-3'-phosphate
  modified_base 21: mod_base = OTHER; note = 2'-O-methylcytidine-3'-phosphorothioate
  modified_base 22: mod_base = OTHER; note = 2'-O-methyladenosine-3'-phosphorothioate
  modified_base 23: mod_base = OTHER; note = 2'-O-methyluridine
acataagatcctatagcctccat

SEQ ID NO: 1335 - RNA, 23 nt, synthetic construct
  source 1..23: mol_type = other RNA
  modified_base 1: mod_base = OTHER; note = 2'-O-methyladenosine-3'-phosphorothioate
  modified_base 2: mod_base = OTHER; note = 2'-deoxy-2'-fluoroguanosine-3'-phosphorothioate
  modified_base 3: mod_base = OTHER; note = 2'-O-methyluridine-3'-phosphate
  modified_base 4: mod_base = OTHER; note = 2'-O-methyluridine-3'-phosphate
  modified_base 5: mod_base = OTHER; note = 2'-O-methyluridine-3'-phosphate
  modified_base 6: mod_base = OTHER; note = 2'-deoxy-2'-fluoroadenosine-3'-phosphate
  modified_base 7: mod_base = OTHER; note = 2'-O-methylcytidine-3'-phosphate
  modified_base 8: mod_base = OTHER; note = 2'-deoxy-2'-fluoroadenosine-3'-phosphate
  modified_base 9: mod_base = OTHER; note = 2'-deoxy-2'-fluorouridine-3'-phosphate
  modified_base 10: mod_base = OTHER; note = 2'-O-methyladenosine-3'-phosphate
  modified_base 11: mod_base = OTHER; note = 2'-O-methyladenosine-3'-phosphate
  modified_base 12: mod_base = OTHER; note = 2'-O-methylguanosine-3'-phosphate
  modified_base 13: mod_base = OTHER; note = 2'-O-methyladenosine-3'-phosphate
  modified_base 14: mod_base = OTHER; note = 2'-deoxy-2'-fluorouridine-3'-phosphate
  modified_base 15: mod_base = OTHER; note = 2'-O-methylcytidine-3'-phosphate
  modified_base 16: mod_base = OTHER; note = 2'-deoxy-2'-fluorocytidine-3'-phosphate
  modified_base 17: mod_base = OTHER; note = 2'-O-methyluridine-3'-phosphate
  modified_base 18: mod_base = OTHER; note = 2'-O-methyladenosine-3'-phosphate
  modified_base 19: mod_base = OTHER; note = 2'-O-methyluridine-3'-phosphate
  modified_base 20: mod_base = OTHER; note = 2'-O-methyladenosine-3'-phosphate
  modified_base 21: mod_base = OTHER; note = 2'-O-methylguanosine-3'-phosphorothioate
  modified_base 22: mod_base = OTHER; note = 2'-O-methylcytidine-3'-phosphorothioate
  modified_base 23: mod_base = OTHER; note = 2'-O-methylcytidine
agtttacataagatcctatagcc

SEQ ID NO: 1336 - RNA, 23 nt, synthetic construct
  source 1..23: mol_type = other RNA
  modified_base 1: mod_base = OTHER; note = 2'-O-methyladenosine-3'-phosphorothioate
  modified_base 2: mod_base = OTHER; note = 2'-deoxy-2'-fluoroadenosine-3'-phosphorothioate
  modified_base 3: mod_base = OTHER; note = 2'-O-methyladenosine-3'-phosphate
  modified_base 4: mod_base = OTHER; note = 2'-O-methyladenosine-3'-phosphate
  modified_base 5: mod_base = OTHER; note = 2'-O-methylcytidine-3'-phosphate
  modified_base 6: mod_base = OTHER; note = 2'-deoxy-2'-fluorouridine-3'-phosphate
  modified_base 7: mod_base = OTHER; note = 2'-O-methylguanosine-3'-phosphate
  modified_base 8: mod_base = OTHER; note = 2'-deoxy-2'-fluorouridine-3'-phosphate
  modified_base 9: mod_base = OTHER; note = 2'-deoxy-2'-fluorouridine-3'-phosphate
  modified_base 10: mod_base = OTHER; note = 2'-O-methyluridine-3'-phosphate
  modified_base 11: mod_base = OTHER; note = 2'-O-methyladenosine-3'-phosphate
  modified_base 12: mod_base = OTHER; note = 2'-O-methylcytidine-3'-phosphate
  modified_base 13: mod_base = OTHER; note = 2'-O-methyladenosine-3'-phosphate
  modified_base 14: mod_base = OTHER; note = 2'-deoxy-2'-fluorouridine-3'-phosphate
  modified_base 15: mod_base = OTHER; note = 2'-O-methyladenosine-3'-phosphate
  modified_base 16: mod_base = OTHER; note = 2'-deoxy-2'-fluoroadenosine-3'-phosphate
  modified_base 17: mod_base = OTHER; note = 2'-O-methylguanosine-3'-phosphate
  modified_base 18: mod_base = OTHER; note = 2'-O-methyladenosine-3'-phosphate
  modified_base 19: mod_base = OTHER; note = 2'-O-methyluridine-3'-phosphate
  modified_base 20: mod_base = OTHER; note = 2'-O-methylcytidine-3'-phosphate
  modified_base 21: mod_base = OTHER; note = 2'-O-methylcytidine-3'-phosphorothioate
  modified_base 22: mod_base = OTHER; note = 2'-O-methyluridine-3'-phosphorothioate
  modified_base 23: mod_base = OTHER; note = 2'-O-methyladenosine
aaaactgtttacataagatccta

SEQ ID NO: 1337 - RNA, 23 nt, synthetic construct
  source 1..23: mol_type = other RNA
  modified_base 1: mod_base = OTHER; note = 2'-O-methyladenosine-3'-phosphorothioate
  modified_base 2: mod_base = OTHER; note = 2'-deoxy-2'-fluoroadenosine-3'-phosphorothioate
  modified_base 3: mod_base = OTHER; note = 2'-O-methyluridine-3'-phosphate
  modified_base 4: mod_base = OTHER; note = 2'-O-methylcytidine-3'-phosphate
  modified_base 5: mod_base = OTHER; note = 2'-O-methyladenosine-3'-phosphate
  modified_base 6: mod_base = OTHER; note = 2'-deoxy-2'-fluoroguanosine-3'-phosphate
  modified_base 7: mod_base = OTHER; note = 2'-O-methyladenosine-3'-phosphate
  modified_base 8: mod_base = OTHER; note = 2'-deoxy-2'-fluoroadenosine-3'-phosphate
  modified_base 9: mod_base = OTHER; note = 2'-deoxy-2'-fluoroadenosine-3'-phosphate
  modified_base 10: mod_base = OTHER; note = 2'-O-methylcytidine-3'-phosphate
  modified_base 11: mod_base = OTHER; note = 2'-O-methyladenosine-3'-phosphate
  modified_base 12: mod_base = OTHER; note = 2'-O-methyladenosine-3'-phosphate
  modified_base 13: mod_base = OTHER; note = 2'-O-methyladenosine-3'-phosphate
  modified_base 14: mod_base = OTHER; note = 2'-deoxy-2'-fluoroadenosine-3'-phosphate
  modified_base 15: mod_base = OTHER; note = 2'-O-methyladenosine-3'-phosphate
  modified_base 16: mod_base = OTHER; note = 2'-deoxy-2'-fluorocytidine-3'-phosphate
  modified_base 17: mod_base = OTHER; note = 2'-O-methyluridine-3'-phosphate
  modified_base 18: mod_base = OTHER; note = 2'-O-methylguanosine-3'-phosphate
  modified_base 19: mod_base = OTHER; note = 2'-O-methyluridine-3'-phosphate
  modified_base 20: mod_base = OTHER; note = 2'-O-methyluridine-3'-phosphate
  modified_base 21: mod_base = OTHER; note = 2'-O-methyluridine-3'-phosphorothioate
  modified_base 22: mod_base = OTHER; note = 2'-O-methyladenosine-3'-phosphorothioate
  modified_base 23: mod_base = OTHER; note = 2'-O-methylcytidine
aatcagaaacaaaaactgtttac

SEQ ID NO: 1338 - RNA, 23 nt, synthetic construct
  source 1..23: mol_type = other RNA
  modified_base 1: mod_base = OTHER; note = 2'-O-methyladenosine-3'-phosphorothioate
  modified_base 2: mod_base = OTHER; note = 2'-deoxy-2'-fluorouridine-3'-phosphorothioate
  modified_base 3: mod_base = OTHER; note = 2'-O-methyluridine-3'-phosphate
  modified_base 4: mod_base = OTHER; note = 2'-O-methyladenosine-3'-phosphate
  modified_base 5: mod_base = OTHER; note = 2'-O-methylcytidine-3'-phosphate
  modified_base 6: mod_base = OTHER; note = 2'-deoxy-2'-fluorouridine-3'-phosphate
  modified_base 7: mod_base = OTHER; note = 2'-O-methyladenosine-3'-phosphate
  modified_base 8: mod_base = OTHER; note = 2'-deoxy-2'-fluorouridine-3'-phosphate
  modified_base 9: mod_base = OTHER; note = 2'-deoxy-2'-fluorocytidine-3'-phosphate
  modified_base 10: mod_base = OTHER; note = 2'-O-methyladenosine-3'-phosphate
  modified_base 11: mod_base = OTHER; note = 2'-O-methylguanosine-3'-phosphate
  modified_base 12: mod_base = OTHER; note = 2'-O-methyladenosine-3'-phosphate
  modified_base 13: mod_base = OTHER; note = 2'-O-methyladenosine-3'-phosphate
  modified_base 14: mod_base = OTHER; note = 2'-deoxy-2'-fluoroadenosine-3'-phosphate
  modified_base 15: mod_base = OTHER; note = 2'-O-methylcytidine-3'-phosphate
  modified_base 16: mod_base = OTHER; note = 2'-deoxy-2'-fluoroadenosine-3'-phosphate
  modified_base 17: mod_base = OTHER; note = 2'-O-methyladenosine-3'-phosphate
  modified_base 18: mod_base = OTHER; note = 2'-O-methyladenosine-3'-phosphate
  modified_base 19: mod_base = OTHER; note = 2'-O-methyladenosine-3'-phosphate
  modified_base 20: mod_base = OTHER; note = 2'-O-methyladenosine-3'-phosphate
  modified_base 21: mod_base = OTHER; note = 2'-O-methylcytidine-3'-phosphorothioate
  modified_base 22: mod_base = OTHER; note = 2'-O-methyluridine-3'-phosphorothioate
  modified_base 23: mod_base = OTHER; note = 2'-O-methylguanosine
attactatcagaaacaaaaactg

SEQ ID NO: 1339 - RNA, 23 nt, synthetic construct
  source 1..23: mol_type = other RNA
  modified_base 1: mod_base = OTHER; note = 2'-O-methyladenosine-3'-phosphorothioate
  modified_base 2: mod_base = OTHER; note = 2'-deoxy-2'-fluoroguanosine-3'-phosphorothioate
  modified_base 3: mod_base = OTHER; note = 2'-O-methyluridine-3'-phosphate
  modified_base 4: mod_base = OTHER; note = 2'-O-methylcytidine-3'-phosphate
  modified_base 5: mod_base = OTHER; note = 2'-O-methylcytidine-3'-phosphate
  modified_base 6: mod_base = OTHER; note = 2'-deoxy-2'-fluoroadenosine-3'-phosphate
  modified_base 7: mod_base = OTHER; note = 2'-O-methyluridine-3'-phosphate
  modified_base 8: mod_base = OTHER; note = 2'-deoxy-2'-fluorouridine-3'-phosphate
  modified_base 9: mod_base = OTHER; note = 2'-deoxy-2'-fluoroadenosine-3'-phosphate
  modified_base 10: mod_base = OTHER; note = 2'-O-methylcytidine-3'-phosphate
  modified_base 11: mod_base = OTHER; note = 2'-O-methyluridine-3'-phosphate
  modified_base 12: mod_base = OTHER; note = 2'-O-methyladenosine-3'-phosphate
  modified_base 13: mod_base = OTHER; note = 2'-O-methyluridine-3'-phosphate
  modified_base 14: mod_base = OTHER; note = 2'-deoxy-2'-fluorocytidine-3'-phosphate
  modified_base 15: mod_base = OTHER; note = 2'-O-methyladenosine-3'-phosphate
  modified_base 16: mod_base = OTHER; note = 2'-deoxy-2'-fluoroguanosine-3'-phosphate
  modified_base 17: mod_base = OTHER; note = 2'-O-methyladenosine-3'-phosphate
  modified_base 18: mod_base = OTHER; note = 2'-O-methyladenosine-3'-phosphate
  modified_base 19: mod_base = OTHER; note = 2'-O-methyladenosine-3'-phosphate
  modified_base 20: mod_base = OTHER; note = 2'-O-methylcytidine-3'-phosphate
  modified_base 21: mod_base = OTHER; note = 2'-O-methyladenosine-3'-phosphorothioate
  modified_base 22: mod_base = OTHER; note = 2'-O-methyladenosine-3'-phosphorothioate
  modified_base 23: mod_base = OTHER; note = 2'-O-methyladenosine
agtccattactatcagaaacaaa

SEQ ID NO: 1340 - RNA, 23 nt, synthetic construct
  source 1..23: mol_type = other RNA
  modified_base 1: mod_base = OTHER; note = 2'-O-methyladenosine-3'-phosphorothioate
  modified_base 2: mod_base = OTHER; note = 2'-deoxy-2'-fluoroadenosine-3'-phosphorothioate
  modified_base 3: mod_base = OTHER; note = 2'-O-methyluridine-3'-phosphate
  modified_base 4: mod_base = OTHER; note = 2'-O-methyladenosine-3'-phosphate
  modified_base 5: mod_base = OTHER; note = 2'-O-methyladenosine-3'-phosphate
  modified_base 6: mod_base = OTHER; note = 2'-deoxy-2'-fluoroadenosine-3'-phosphate
  modified_base 7: mod_base = OTHER; note = 2'-O-methylguanosine-3'-phosphate
  modified_base 8: mod_base = OTHER; note = 2'-deoxy-2'-fluorouridine-3'-phosphate
  modified_base 9: mod_base = OTHER; note = 2'-deoxy-2'-fluorocytidine-3'-phosphate
  modified_base 10: mod_base = OTHER; note = 2'-O-methylcytidine-3'-phosphate
  modified_base 11: mod_base = OTHER; note = 2'-O-methyladenosine-3'-phosphate
  modified_base 12: mod_base = OTHER; note = 2'-O-methyluridine-3'-phosphate
  modified_base 13: mod_base = OTHER; note = 2'-O-methyluridine-3'-phosphate
  modified_base 14: mod_base = OTHER; note = 2'-deoxy-2'-fluoroadenosine-3'-phosphate
  modified_base 15: mod_base = OTHER; note = 2'-O-methylcytidine-3'-phosphate
  modified_base 16: mod_base = OTHER; note = 2'-deoxy-2'-fluorouridine-3'-phosphate
  modified_base 17: mod_base = OTHER; note = 2'-O-methyladenosine-3'-phosphate
  modified_base 18: mod_base = OTHER; note = 2'-O-methyluridine-3'-phosphate
  modified_base 19: mod_base = OTHER; note = 2'-O-methylcytidine-3'-phosphate
  modified_base 20: mod_base = OTHER; note = 2'-O-methyladenosine-3'-phosphate
  modified_base 21: mod_base = OTHER; note = 2'-O-methylguanosine-3'-phosphorothioate
  modified_base 22: mod_base = OTHER; note = 2'-O-methyladenosine-3'-phosphorothioate
  modified_base 23: mod_base = OTHER; note = 2'-O-methyladenosine
aataaagtccattactatcagaa

SEQ ID NO: 1341 - RNA, 23 nt, synthetic construct
  source 1..23: mol_type = other RNA
  modified_base 1: mod_base = OTHER; note = 2'-O-methyladenosine-3'-phosphorothioate
  modified_base 2: mod_base = OTHER; note = 2'-deoxy-2'-fluoroadenosine-3'-phosphorothioate
  modified_base 3: mod_base = OTHER; note = 2'-O-methyladenosine-3'-phosphate
  modified_base 4: mod_base = OTHER; note = 2'-O-methylguanosine-3'-phosphate
  modified_base 5: mod_base = OTHER; note = 2'-O-methyluridine-3'-phosphate
  modified_base 6: mod_base = OTHER; note = 2'-deoxy-2'-fluorouridine-3'-phosphate
  modified_base 7: mod_base = OTHER; note = 2'-O-methyladenosine-3'-phosphate
  modified_base 8: mod_base = OTHER; note = 2'-deoxy-2'-fluoroguanosine-3'-phosphate
  modified_base 9: mod_base = OTHER; note = 2'-deoxy-2'-fluoroadenosine-3'-phosphate
  modified_base 10: mod_base = OTHER; note = 2'-O-methyladenosine-3'-phosphate
  modified_base 11: mod_base = OTHER; note = 2'-O-methyluridine-3'-phosphate
  modified_base 12: mod_base = OTHER; note = 2'-O-methyladenosine-3'-phosphate
  modified_base 13: mod_base = OTHER; note = 2'-O-methyladenosine-3'-phosphate
  modified_base 14: mod_base = OTHER; note = 2'-deoxy-2'-fluoroadenosine-3'-phosphate
  modified_base 15: mod_base = OTHER; note = 2'-O-methylguanosine-3'-phosphate
  modified_base 16: mod_base = OTHER; note = 2'-deoxy-2'-fluorouridine-3'-phosphate
  modified_base 17: mod_base = OTHER; note = 2'-O-methylcytidine-3'-phosphate
  modified_base 18: mod_base = OTHER; note = 2'-O-methylcytidine-3'-phosphate
  modified_base 19: mod_base = OTHER; note = 2'-O-methyladenosine-3'-phosphate
  modified_base 20: mod_base = OTHER; note = 2'-O-methyluridine-3'-phosphate
  modified_base 21: mod_base = OTHER; note = 2'-O-methyluridine-3'-phosphorothioate
  modified_base 22: mod_base = OTHER; note = 2'-O-methyladenosine-3'-phosphorothioate
  modified_base 23: mod_base = OTHER; note = 2'-O-methylcytidine
aaagttagaataaagtccattac

SEQ ID NO: 1342 - RNA, 23 nt, synthetic construct
  source 1..23: mol_type = other RNA
  modified_base 1: mod_base = OTHER; note = 2'-O-methyladenosine-3'-phosphorothioate
  modified_base 2: mod_base = OTHER; note = 2'-deoxy-2'-fluorouridine-3'-phosphorothioate
  modified_base 3: mod_base = OTHER; note = 2'-O-methylguanosine-3'-phosphate
  modified_base 4: mod_base = OTHER; note = 2'-O-methyladenosine-3'-phosphate
  modified_base 5: mod_base = OTHER; note = 2'-O-methyluridine-3'-phosphate
  modified_base 6: mod_base = OTHER; note = 2'-deoxy-2'-fluorocytidine-3'-phosphate
  modified_base 7: mod_base = OTHER; note = 2'-O-methyluridine-3'-phosphate
  modified_base 8: mod_base = OTHER; note = 2'-deoxy-2'-fluorocytidine-3'-phosphate
  modified_base 9: mod_base = OTHER; note = 2'-deoxy-2'-fluoroadenosine-3'-phosphate
  modified_base 10: mod_base = OTHER; note = 2'-O-methyladenosine-3'-phosphate
  modified_base 11: mod_base = OTHER; note = 2'-O-methylguanosine-3'-phosphate
  modified_base 12: mod_base = OTHER; note = 2'-O-methyluridine-3'-phosphate
  modified_base 13: mod_base = OTHER; note = 2'-O-methyluridine-3'-phosphate
  modified_base 14: mod_base = OTHER; note = 2'-deoxy-2'-fluoroadenosine-3'-phosphate
  modified_base 15: mod_base = OTHER; note = 2'-O-methylguanosine-3'-phosphate
  modified_base 16: mod_base = OTHER; note = 2'-deoxy-2'-fluoroadenosine-3'-phosphate
  modified_base 17: mod_base = OTHER; note = 2'-O-methyladenosine-3'-phosphate
  modified_base 18: mod_base = OTHER; note = 2'-O-methyluridine-3'-phosphate
  modified_base 19: mod_base = OTHER; note = 2'-O-methyladenosine-3'-phosphate
  modified_base 20: mod_base = OTHER; note = 2'-O-methyladenosine-3'-phosphate
  modified_base 21: mod_base = OTHER; note = 2'-O-methyladenosine-3'-phosphorothioate
  modified_base 22: mod_base = OTHER; note = 2'-O-methylguanosine-3'-phosphorothioate
  modified_base 23: mod_base = OTHER; note = 2'-O-methyluridine
atgatctcaagttagaataaagt

SEQ ID NO: 1343 - RNA, 23 nt, synthetic construct
  source 1..23: mol_type = other RNA
  modified_base 1: mod_base = OTHER; note = 2'-O-methyladenosine-3'-phosphorothioate
  modified_base 2: mod_base = OTHER; note = 2'-deoxy-2'-fluoroguanosine-3'-phosphorothioate
  modified_base 3: mod_base = OTHER; note = 2'-O-methylcytidine-3'-phosphate
  modified_base 4: mod_base = OTHER; note = 2'-O-methylcytidine-3'-phosphate
  modified_base 5: mod_base = OTHER; note = 2'-O-methyladenosine-3'-phosphate
  modified_base 6: mod_base = OTHER; note = 2'-deoxy-2'-fluorocytidine-3'-phosphate
  modified_base 7: mod_base = OTHER; note = 2'-O-methyluridine-3'-phosphate
  modified_base 8: mod_base = OTHER; note = 2'-deoxy-2'-fluoroguanosine-3'-phosphate
  modified_base 9: mod_base = OTHER; note = 2'-deoxy-2'-fluoroadenosine-3'-phosphate
  modified_base 10: mod_base = OTHER; note = 2'-O-methyluridine-3'-phosphate
  modified_base 11: mod_base = OTHER; note = 2'-O-methylcytidine-3'-phosphate
  modified_base 12: mod_base = OTHER; note = 2'-O-methyluridine-3'-phosphate
  modified_base 13: mod_base = OTHER; note = 2'-O-methylcytidine-3'-phosphate
  modified_base 14: mod_base = OTHER; note = 2'-deoxy-2'-fluoroadenosine-3'-phosphate
  modified_base 15: mod_base = OTHER; note = 2'-O-methyladenosine-3'-phosphate
  modified_base 16: mod_base = OTHER; note = 2'-deoxy-2'-fluoroguanosine-3'-phosphate
  modified_base 17: mod_base = OTHER; note = 2'-O-methyluridine-3'-phosphate
  modified_base 18: mod_base = OTHER; note = 2'-O-methyluridine-3'-phosphate
  modified_base 19: mod_base = OTHER; note = 2'-O-methyladenosine-3'-phosphate
  modified_base 20: mod_base = OTHER; note = 2'-O-methylguanosine-3'-phosphate
  modified_base 21: mod_base = OTHER; note = 2'-O-methyladenosine-3'-phosphorothioate
  modified_base 22: mod_base = OTHER; note = 2'-O-methyladenosine-3'-phosphorothioate
  modified_base 23: mod_base = OTHER; note = 2'-O-methyluridine
agccactgatctcaagttagaat

SEQ ID NO: 1344 - RNA, 23 nt, synthetic construct
  source 1..23: mol_type = other RNA
  modified_base 1: mod_base = OTHER; note = 2'-O-methyladenosine-3'-phosphorothioate
  modified_base 2: mod_base = OTHER; note = 2'-deoxy-2'-fluorouridine-3'-phosphorothioate
  modified_base 3: mod_base = OTHER; note = 2'-O-methyluridine-3'-phosphate
  modified_base 4: mod_base = OTHER; note = 2'-O-methyluridine-3'-phosphate
  modified_base 5: mod_base = OTHER; note = 2'-O-methylguanosine-3'-phosphate
  modified_base 6: mod_base = OTHER; note = 2'-deoxy-2'-fluoroadenosine-3'-phosphate
  modified_base 7: mod_base = OTHER; note = 2'-O-methyluridine-3'-phosphate
  modified_base 8: mod_base = OTHER; note = 2'-deoxy-2'-fluorocytidine-3'-phosphate
  modified_base 9: mod_base = OTHER; note = 2'-deoxy-2'-fluorocytidine-3'-phosphate
  modified_base 10: mod_base = OTHER; note = 2'-O-methylguanosine-3'-phosphate
  modified_base 11: mod_base = OTHER; note = 2'-O-methylcytidine-3'-phosphate
  modified_base 12: mod_base = OTHER; note = 2'-O-methylcytidine-3'-phosphate
  modified_base 13: mod_base = OTHER; note = 2'-O-methyladenosine-3'-phosphate
  modified_base 14: mod_base = OTHER; note = 2'-deoxy-2'-fluorocytidine-3'-phosphate
  modified_base 15: mod_base = OTHER; note = 2'-O-methyluridine-3'-phosphate
  modified_base 16: mod_base = OTHER; note = 2'-deoxy-2'-fluoroguanosine-3'-phosphate
  modified_base 17: mod_base = OTHER; note = 2'-O-methyladenosine-3'-phosphate
  modified_base 18: mod_base = OTHER; note = 2'-O-methyluridine-3'-phosphate
  modified_base 19: mod_base = OTHER; note = 2'-O-methylcytidine-3'-phosphate
  modified_base 20: mod_base = OTHER; note = 2'-O-methyluridine-3'-phosphate
  modified_base 21: mod_base = OTHER; note = 2'-O-methylcytidine-3'-phosphorothioate
  modified_base 22: mod_base = OTHER; note = 2'-O-methyladenosine-3'-phosphorothioate
  modified_base 23: mod_base = OTHER; note = 2'-O-methyladenosine
atttgatccgccactgatctcaa

SEQ ID NO: 1345 - RNA, 23 nt, synthetic construct
  source 1..23: mol_type = other RNA
  modified_base 1: mod_base = OTHER; note = 2'-O-methyladenosine-3'-phosphorothioate
  modified_base 2: mod_base = OTHER; note = 2'-deoxy-2'-fluorouridine-3'-phosphorothioate
  modified_base 3: mod_base = OTHER; note = 2'-O-methyladenosine-3'-phosphate
  modified_base 4: mod_base = OTHER; note = 2'-O-methylguanosine-3'-phosphate
  modified_base 5: mod_base = OTHER; note = 2'-O-methylguanosine-3'-phosphate
  modified_base 6: mod_base = OTHER; note = 2'-deoxy-2'-fluorouridine-3'-phosphate
  modified_base 7: mod_base = OTHER; note = 2'-O-methyluridine-3'-phosphate
  modified_base 8: mod_base = OTHER; note = 2'-deoxy-2'-fluorouridine-3'-phosphate
  modified_base 9: mod_base = OTHER; note = 2'-deoxy-2'-fluorouridine-3'-phosphate
  modified_base 10: mod_base = OTHER; note = 2'-O-methylguanosine-3'-phosphate
  modified_base 11: mod_base = OTHER; note = 2'-O-methyladenosine-3'-phosphate
  modified_base 12: mod_base = OTHER; note = 2'-O-methyluridine-3'-phosphate
  modified_base 13: mod_base = OTHER; note = 2'-O-methylcytidine-3'-phosphate
  modified_base 14: mod_base = OTHER; note = 2'-deoxy-2'-fluorocytidine-3'-phosphate
  modified_base 15: mod_base = OTHER; note = 2'-O-methylguanosine-3'-phosphate
  modified_base 16: mod_base = OTHER; note = 2'-deoxy-2'-fluorocytidine-3'-phosphate
  modified_base 17: mod_base = OTHER; note = 2'-O-methylcytidine-3'-phosphate
  modified_base 18: mod_base = OTHER; note = 2'-O-methyladenosine-3'-phosphate
  modified_base 19: mod_base = OTHER; note = 2'-O-methylcytidine-3'-phosphate
  modified_base 20: mod_base = OTHER; note = 2'-O-methyluridine-3'-phosphate
  modified_base 21: mod_base = OTHER; note = 2'-O-methylguanosine-3'-phosphorothioate
  modified_base 22: mod_base = OTHER; note = 2'-O-methyladenosine-3'-phosphorothioate
  modified_base 23: mod_base = OTHER; note = 2'-O-methyluridine
ataggttttgatccgccactgat

SEQ ID NO: 1346 - RNA, 23 nt, synthetic construct
  source 1..23: mol_type = other RNA
  modified_base 1: mod_base = OTHER; note = 2'-O-methyladenosine-3'-phosphorothioate
  modified_base 2: mod_base = OTHER; note = 2'-deoxy-2'-fluoroadenosine-3'-phosphorothioate
  modified_base 3: mod_base = OTHER; note = 2'-O-methyladenosine-3'-phosphate
  modified_base 4: mod_base = OTHER; note = 2'-O-methyluridine-3'-phosphate
  modified_base 5: mod_base = OTHER; note = 2'-O-methylcytidine-3'-phosphate
  modified_base 6: mod_base = OTHER; note = 2'-deoxy-2'-fluorouridine-3'-phosphate
  modified_base 7: mod_base = OTHER; note = 2'-O-methyluridine-3'-phosphate
  modified_base 8: mod_base = OTHER; note = 2'-deoxy-2'-fluoroguanosine-3'-phosphate
  modified_base 9: mod_base = OTHER; note = 2'-deoxy-2'-fluorouridine-3'-phosphate
  modified_base 10: mod_base = OTHER; note = 2'-O-methyladenosine-3'-phosphate
  modified_base 11: mod_base = OTHER; note = 2'-O-methylguanosine-3'-phosphate
  modified_base 12: mod_base = OTHER; note = 2'-O-methylguanosine-3'-phosphate
  modified_base 13: mod_base = OTHER; note = 2'-O-methyluridine-3'-phosphate
  modified_base 14: mod_base = OTHER; note = 2'-deoxy-2'-fluorouridine-3'-phosphate
  modified_base 15: mod_base = OTHER; note = 2'-O-methyluridine-3'-phosphate
  modified_base 16: mod_base = OTHER; note = 2'-deoxy-2'-fluorouridine-3'-phosphate
  modified_base 17: mod_base = OTHER; note = 2'-O-methylguanosine-3'-phosphate
  modified_base 18: mod_base = OTHER; note = 2'-O-methyladenosine-3'-phosphate
  modified_base 19: mod_base = OTHER; note = 2'-O-methyluridine-3'-phosphate
  modified_base 20: mod_base = OTHER; note = 2'-O-methylcytidine-3'-phosphate
  modified_base 21: mod_base = OTHER; note = 2'-O-methylcytidine-3'-phosphorothioate
  modified_base 22: mod_base = OTHER; note = 2'-O-methylguanosine-3'-phosphorothioate
  modified_base 23: mod_base = OTHER; note = 2'-O-methylcytidine
aaatcttgtaggttttgatccgc

SEQ ID NO: 1347 - RNA, 23 nt, synthetic construct
  source 1..23: mol_type = other RNA
  modified_base 1: mod_base = OTHER; note = 2'-O-methyladenosine-3'-phosphorothioate
  modified_base 2: mod_base = OTHER; note = 2'-deoxy-2'-fluoroadenosine-3'-phosphorothioate
  modified_base 3: mod_base = OTHER; note = 2'-O-methylguanosine-3'-phosphate
  modified_base 4: mod_base = OTHER; note = 2'-O-methyluridine-3'-phosphate
  modified_base 5: mod_base = OTHER; note = 2'-O-methyluridine-3'-phosphate
  modified_base 6: mod_base = OTHER; note = 2'-deoxy-2'-fluoroguanosine-3'-phosphate
  modified_base 7: mod_base = OTHER; note = 2'-O-methyladenosine-3'-phosphate
  modified_base 8: mod_base = OTHER; note = 2'-deoxy-2'-fluoroadenosine-3'-phosphate
  modified_base 9: mod_base = OTHER; note = 2'-deoxy-2'-fluorouridine-3'-phosphate
  modified_base 10: mod_base = OTHER; note = 2'-O-methylcytidine-3'-phosphate
  modified_base 11: mod_base = OTHER; note = 2'-O-methyluridine-3'-phosphate
  modified_base 12: mod_base = OTHER; note = 2'-O-methyluridine-3'-phosphate
  modified_base 13: mod_base = OTHER; note = 2'-O-methylguanosine-3'-phosphate
  modified_base 14: mod_base = OTHER; note = 2'-deoxy-2'-fluorouridine-3'-phosphate
  modified_base 15: mod_base = OTHER; note = 2'-O-methyladenosine-3'-phosphate
  modified_base 16: mod_base = OTHER; note = 2'-deoxy-2'-fluoroguanosine-3'-phosphate
  modified_base 17: mod_base = OTHER; note = 2'-O-methylguanosine-3'-phosphate
  modified_base 18: mod_base = OTHER; note = 2'-O-methyluridine-3'-phosphate
  modified_base 19: mod_base = OTHER; note = 2'-O-methyluridine-3'-phosphate
  modified_base 20: mod_base = OTHER; note = 2'-O-methyluridine-3'-phosphate
  modified_base 21: mod_base = OTHER; note = 2'-O-methyluridine-3'-phosphorothioate
  modified_base 22: mod_base = OTHER; note = 2'-O-methylguanosine-3'-phosphorothioate
  modified_base 23: mod_base = OTHER; note = 2'-O-methyladenosine
aagttgaatcttgtaggttttga

SEQ ID NO: 1348 - RNA, 23 nt, synthetic construct
  source 1..23: mol_type = other RNA
  modified_base 1: mod_base = OTHER; note = 2'-O-methyladenosine-3'-phosphorothioate
  modified_base 2: mod_base = OTHER; note = 2'-deoxy-2'-fluorouridine-3'-phosphorothioate
  modified_base 3: mod_base = OTHER; note = 2'-O-methyluridine-3'-phosphate
  modified_base 4: mod_base = OTHER; note = 2'-O-methyluridine-3'-phosphate
  modified_base 5: mod_base = OTHER; note = 2'-O-methyluridine-3'-phosphate
  modified_base 6: mod_base = OTHER; note = 2'-deoxy-2'-fluorocytidine-3'-phosphate
  modified_base 7: mod_base = OTHER; note = 2'-O-methyladenosine-3'-phosphate
  modified_base 8: mod_base = OTHER; note = 2'-deoxy-2'-fluoroguanosine-3'-phosphate
  modified_base 9: mod_base = OTHER; note = 2'-deoxy-2'-fluorouridine-3'-phosphate
  modified_base 10: mod_base = OTHER; note = 2'-O-methyluridine-3'-phosphate
  modified_base 11: mod_base = OTHER; note = 2'-O-methylguanosine-3'-phosphate
  modified_base 12: mod_base = OTHER; note = 2'-O-methyladenosine-3'-phosphate
  modified_base 13: mod_base = OTHER; note = 2'-O-methyladenosine-3'-phosphate
  modified_base 14: mod_base = OTHER; note = 2'-deoxy-2'-fluorouridine-3'-phosphate
  modified_base 15: mod_base = OTHER; note = 2'-O-methylcytidine-3'-phosphate
  modified_base 16: mod_base = OTHER; note = 2'-deoxy-2'-fluorouridine-3'-phosphate
  modified_base 17: mod_base = OTHER; note = 2'-O-methyluridine-3'-phosphate
  modified_base 18: mod_base = OTHER; note = 2'-O-methylguanosine-3'-phosphate
  modified_base 19: mod_base = OTHER; note = 2'-O-methyluridine-3'-phosphate
  modified_base 20: mod_base = OTHER; note = 2'-O-methyladenosine-3'-phosphate
  modified_base 21: mod_base = OTHER; note = 2'-O-methylguanosine-3'-phosphorothioate
  modified_base 22: mod_base = OTHER; note = 2'-O-methylguanosine-3'-phosphorothioate
  modified_base 23: mod_base = OTHER; note = 2'-O-methyluridine
attttcagttgaatcttgtaggt

SEQ ID NO: 1349 - RNA, 23 nt, synthetic construct
  source 1..23: mol_type = other RNA
  modified_base 1: mod_base = OTHER; note = 2'-O-methyladenosine-3'-phosphorothioate
  modified_base 2: mod_base = OTHER; note = 2'-deoxy-2'-fluorocytidine-3'-phosphorothioate
  modified_base 3: mod_base = OTHER; note = 2'-O-methylcytidine-3'-phosphate
  modified_base 4: mod_base = OTHER; note = 2'-O-methyladenosine-3'-phosphate
  modified_base 5: mod_base = OTHER; note = 2'-O-methyladenosine-3'-phosphate
  modified_base 6: mod_base = OTHER; note = 2'-deoxy-2'-fluorocytidine-3'-phosphate
  modified_base 7: mod_base = OTHER; note = 2'-O-methyluridine-3'-phosphate
  modified_base 8: mod_base = OTHER; note = 2'-deoxy-2'-fluorouridine-3'-phosphate
  modified_base 9: mod_base = OTHER; note = 2'-deoxy-2'-fluorouridine-3'-phosphate
  modified_base 10: mod_base = OTHER; note = 2'-O-methyluridine-3'-phosphate
  modified_base 11: mod_base = OTHER; note = 2'-O-methylcytidine-3'-phosphate
  modified_base 12: mod_base = OTHER; note = 2'-O-methyladenosine-3'-phosphate
  modified_base 13: mod_base = OTHER; note = 2'-O-methylguanosine-3'-phosphate
  modified_base 14: mod_base = OTHER; note = 2'-deoxy-2'-fluorouridine-3'-phosphate
  modified_base 15: mod_base = OTHER; note = 2'-O-methyluridine-3'-phosphate
  modified_base 16: mod_base = OTHER; note = 2'-deoxy-2'-fluoroguanosine-3'-phosphate
  modified_base 17: mod_base = OTHER; note = 2'-O-methyladenosine-3'-phosphate
  modified_base 18: mod_base = OTHER; note = 2'-O-methyladenosine-3'-phosphate
  modified_base 19: mod_base = OTHER; note = 2'-O-methyluridine-3'-phosphate
  modified_base 20: mod_base = OTHER; note = 2'-O-methylcytidine-3'-phosphate
  modified_base 21: mod_base = OTHER; note = 2'-O-methyluridine-3'-phosphorothioate
  modified_base 22: mod_base = OTHER; note = 2'-O-methyluridine-3'-phosphorothioate
  modified_base 23: mod_base = OTHER; note = 2'-O-methylguanosine
accaacttttcagttgaatcttg

SEQ ID NO: 1350 - RNA, 23 nt, synthetic construct
  source 1..23: mol_type = other RNA
  modified_base 1: mod_base = OTHER; note = 2'-O-methyladenosine-3'-phosphorothioate
  modified_base 2: mod_base = OTHER; note = 2'-deoxy-2'-fluorouridine-3'-phosphorothioate
  modified_base 3: mod_base = OTHER; note = 2'-O-methyladenosine-3'-phosphate
  modified_base 4: mod_base = OTHER; note = 2'-O-methyladenosine-3'-phosphate
  modified_base 5: mod_base = OTHER; note = 2'-O-methylcytidine-3'-phosphate
  modified_base 6: mod_base = OTHER; note = 2'-deoxy-2'-fluorouridine-3'-phosphate
  modified_base 7: mod_base = OTHER; note = 2'-O-methylguanosine-3'-phosphate
  modified_base 8: mod_base = OTHER; note = 2'-deoxy-2'-fluorocytidine-3'-phosphate
  modified_base 9: mod_base = OTHER; note = 2'-deoxy-2'-fluorocytidine-3'-phosphate
  modified_base 10: mod_base = OTHER; note = 2'-O-methyladenosine-3'-phosphate
  modified_base 11: mod_base = OTHER; note = 2'-O-methyladenosine-3'-phosphate
  modified_base 12: mod_base = OTHER; note = 2'-O-methylcytidine-3'-phosphate
  modified_base 13: mod_base = OTHER; note = 2'-O-methyluridine-3'-phosphate
  modified_base 14: mod_base = OTHER; note = 2'-deoxy-2'-fluorouridine-3'-phosphate
  modified_base 15: mod_base = OTHER; note = 2'-O-methyluridine-3'-phosphate
  modified_base 16: mod_base = OTHER; note = 2'-deoxy-2'-fluorouridine-3'-phosphate
  modified_base 17: mod_base = OTHER; note = 2'-O-methylcytidine-3'-phosphate
  modified_base 18: mod_base = OTHER; note = 2'-O-methyladenosine-3'-phosphate
  modified_base 19: mod_base = OTHER; note = 2'-O-methylguanosine-3'-phosphate
  modified_base 20: mod_base = OTHER; note = 2'-O-methyluridine-3'-phosphate
  modified_base 21: mod_base = OTHER; note = 2'-O-methyluridine-3'-phosphorothioate
  modified_base 22: mod_base = OTHER; note = 2'-O-methylguanosine-3'-phosphorothioate
  modified_base 23: mod_base = OTHER; note = 2'-O-methyladenosine
ataactgccaacttttcagttga

SEQ ID NO: 1351 - RNA, 23 nt, synthetic construct
  source 1..23: mol_type = other RNA
  modified_base 1: mod_base = OTHER; note = 2'-O-methyladenosine-3'-phosphorothioate
  modified_base 2: mod_base = OTHER; note = 2'-deoxy-2'-fluoroadenosine-3'-phosphorothioate
  modified_base 3: mod_base = OTHER; note = 2'-O-methyladenosine-3'-phosphate
  modified_base 4: mod_base = OTHER; note = 2'-O-methyladenosine-3'-phosphate
  modified_base 5: mod_base = OTHER; note = 2'-O-methylcytidine-3'-phosphate
  modified_base 6: mod_base = OTHER; note = 2'-deoxy-2'-fluorocytidine-3'-phosphate
  modified_base 7: mod_base = OTHER; note = 2'-O-methyladenosine-3'-phosphate
  modified_base 8: mod_base = OTHER; note = 2'-deoxy-2'-fluorouridine-3'-phosphate
  modified_base 9: mod_base = OTHER; note = 2'-deoxy-2'-fluoroadenosine-3'-phosphate
  modified_base 10: mod_base = OTHER; note = 2'-O-methyladenosine-3'-phosphate
  modified_base 11: mod_base = OTHER; note = 2'-O-methylcytidine-3'-phosphate
  modified_base 12: mod_base = OTHER; note = 2'-O-methyluridine-3'-phosphate
  modified_base 13: mod_base = OTHER; note = 2'-O-methylguanosine-3'-phosphate
  modified_base 14: mod_base = OTHER; note = 2'-deoxy-2'-fluorocytidine-3'-phosphate
  modified_base 15: mod_base = OTHER; note = 2'-O-methylcytidine-3'-phosphate
  modified_base 16: mod_base = OTHER; note = 2'-deoxy-2'-fluoroadenosine-3'-phosphate
  modified_base 17: mod_base = OTHER; note = 2'-O-methyladenosine-3'-phosphate
  modified_base 18: mod_base = OTHER; note = 2'-O-methylcytidine-3'-phosphate
  modified_base 19: mod_base = OTHER; note = 2'-O-methyluridine-3'-phosphate
  modified_base 20: mod_base = OTHER; note = 2'-O-methyluridine-3'-phosphate
  modified_base 21: mod_base = OTHER; note = 2'-O-methyluridine-3'-phosphorothioate
  modified_base 22: mod_base = OTHER; note = 2'-O-methyluridine-3'-phosphorothioate
  modified_base 23: mod_base = OTHER; note = 2'-O-methylcytidine
aaaaccataactgccaacttttc

SEQ ID NO: 1352 - RNA, 23 nt, synthetic construct
  source 1..23: mol_type = other RNA
  modified_base 1: mod_base = OTHER; note = 2'-O-methyladenosine-3'-phosphorothioate
  modified_base 2: mod_base = OTHER; note = 2'-deoxy-2'-fluoroadenosine-3'-phosphorothioate
  modified_base 3: mod_base = OTHER; note = 2'-O-methyladenosine-3'-phosphate
  modified_base 4: mod_base = OTHER; note = 2'-O-methyladenosine-3'-phosphate
  modified_base 5: mod_base = OTHER; note = 2'-O-methylguanosine-3'-phosphate
  modified_base 6: mod_base = OTHER; note = 2'-deoxy-2'-fluoroadenosine-3'-phosphate
  modified_base 7: mod_base = OTHER; note = 2'-O-methyladenosine-3'-phosphate
  modified_base 8: mod_base = OTHER; note = 2'-deoxy-2'-fluoroadenosine-3'-phosphate
  modified_base 9: mod_base = OTHER; note = 2'-deoxy-2'-fluoroadenosine-3'-phosphate
  modified_base 10: mod_base = OTHER; note = 2'-O-methylcytidine-3'-phosphate
  modified_base 11: mod_base = OTHER; note = 2'-O-methylcytidine-3'-phosphate
  modified_base 12: mod_base = OTHER; note = 2'-O-methyladenosine-3'-phosphate
  modified_base 13: mod_base = OTHER; note = 2'-O-methyluridine-3'-phosphate
  modified_base 14: mod_base = OTHER; note = 2'-deoxy-2'-fluoroadenosine-3'-phosphate
  modified_base 15: mod_base = OTHER; note = 2'-O-methyladenosine-3'-phosphate
  modified_base 16: mod_base = OTHER; note = 2'-deoxy-2'-fluorocytidine-3'-phosphate
  modified_base 17: mod_base = OTHER; note = 2'-O-methyluridine-3'-phosphate
  modified_base 18: mod_base = OTHER; note = 2'-O-methylguanosine-3'-phosphate
  modified_base 19: mod_base = OTHER; note = 2'-O-methylcytidine-3'-phosphate
  modified_base 20: mod_base = OTHER; note = 2'-O-methylcytidine-3'-phosphate
  modified_base 21: mod_base = OTHER; note = 2'-O-methyladenosine-3'-phosphorothioate
  modified_base 22: mod_base = OTHER; note = 2'-O-methyladenosine-3'-phosphorothioate
  modified_base 23: mod_base = OTHER; note = 2'-O-methylcytidine
aaaagaaaaccataactgccaac

SEQ ID NO: 1353 - RNA, 23 nt, synthetic construct
  source 1..23: mol_type = other RNA
  modified_base 1: mod_base = OTHER; note = 2'-O-methyladenosine-3'-phosphorothioate
  modified_base 2: mod_base = OTHER; note = 2'-deoxy-2'-fluoroadenosine-3'-phosphorothioate
  modified_base 3: mod_base = OTHER; note = 2'-O-methylguanosine-3'-phosphate
  modified_base 4: mod_base = OTHER; note = 2'-O-methyladenosine-3'-phosphate
  modified_base 5: mod_base = OTHER; note = 2'-O-methyluridine-3'-phosphate
  modified_base 6: mod_base = OTHER; note = 2'-deoxy-2'-fluoroguanosine-3'-phosphate
  modified_base 7: mod_base = OTHER; note = 2'-O-methyladenosine-3'-phosphate
  modified_base 8: mod_base = OTHER; note = 2'-deoxy-2'-fluoroadenosine-3'-phosphate
  modified_base 9: mod_base = OTHER; note = 2'-deoxy-2'-fluoroadenosine-3'-phosphate
  modified_base 10: mod_base = OTHER; note = 2'-O-methylguanosine-3'-phosphate
  modified_base 11: mod_base = OTHER; note = 2'-O-methyladenosine-3'-phosphate
  modified_base 12: mod_base = OTHER; note = 2'-O-methyladenosine-3'-phosphate
  modified_base 13: mod_base = OTHER; note = 2'-O-methyladenosine-3'-phosphate
  modified_base 14: mod_base = OTHER; note = 2'-deoxy-2'-fluoroadenosine-3'-phosphate
  modified_base 15: mod_base = OTHER; note = 2'-O-methylcytidine-3'-phosphate
  modified_base 16: mod_base = OTHER; note = 2'-deoxy-2'-fluorocytidine-3'-phosphate
  modified_base 17: mod_base = OTHER; note = 2'-O-methyladenosine-3'-phosphate
  modified_base 18: mod_base = OTHER; note = 2'-O-methyluridine-3'-phosphate
  modified_base 19: mod_base = OTHER; note = 2'-O-methyladenosine-3'-phosphate
  modified_base 20: mod_base = OTHER; note = 2'-O-methyladenosine-3'-phosphate
  modified_base 21: mod_base = OTHER; note = 2'-O-methylcytidine-3'-phosphorothioate
  modified_base 22: mod_base = OTHER; note = 2'-O-methyluridine-3'-phosphorothioate
  modified_base 23: mod_base = OTHER; note = 2'-O-methylguanosine
aagatgaaagaaaaccataactg

SEQ ID NO: 1354 - RNA, 23 nt, synthetic construct
  source 1..23: mol_type = other RNA
  modified_base 1: mod_base = OTHER; note = 2'-O-methyladenosine-3'-phosphorothioate
  modified_base 2: mod_base = OTHER; note = 2'-deoxy-2'-fluorouridine-3'-phosphorothioate
  modified_base 3: mod_base = OTHER; note = 2'-O-methylguanosine-3'-phosphate
  modified_base 4: mod_base = OTHER; note = 2'-O-methyladenosine-3'-phosphate
  modified_base 5: mod_base = OTHER; note = 2'-O-methylcytidine-3'-phosphate
  modified_base 6: mod_base = OTHER; note = 2'-deoxy-2'-fluoroadenosine-3'-phosphate
  modified_base 7: mod_base = OTHER; note = 2'-O-methylcytidine-3'-phosphate
  modified_base 8: mod_base = OTHER; note = 2'-deoxy-2'-fluoroadenosine-3'-phosphate
  modified_base 9: mod_base = OTHER; note = 2'-deoxy-2'-fluorouridine-3'-phosphate
  modified_base 10: mod_base = OTHER; note = 2'-O-methylcytidine-3'-phosphate
  modified_base 11: mod_base = OTHER; note = 2'-O-methyladenosine-3'-phosphate
  modified_base 12: mod_base = OTHER; note = 2'-O-methylguanosine-3'-phosphate
  modified_base 13: mod_base = OTHER; note = 2'-O-methyladenosine-3'-phosphate
  modified_base 14: mod_base = OTHER; note = 2'-deoxy-2'-fluorouridine-3'-phosphate
  modified_base 15: mod_base = OTHER; note = 2'-O-methylguanosine-3'-phosphate
  modified_base 16: mod_base = OTHER; note = 2'-deoxy-2'-fluoroadenosine-3'-phosphate
  modified_base 17: mod_base = OTHER; note = 2'-O-methyladenosine-3'-phosphate
  modified_base 18: mod_base = OTHER; note = 2'-O-methyladenosine-3'-phosphate
  modified_base 19: mod_base = OTHER; note = 2'-O-methylguanosine-3'-phosphate
  modified_base 20: mod_base = OTHER; note = 2'-O-methyladenosine-3'-phosphate
  modified_base 21: mod_base = OTHER; note = 2'-O-methyladenosine-3'-phosphorothioate
  modified_base 22: mod_base = OTHER; note = 2'-O-methyladenosine-3'-phosphorothioate
  modified_base 23: mod_base = OTHER; note = 2'-O-methyladenosine
atgacacatcagatgaaagaaaa

SEQ ID NO: 1355 - RNA, 23 nt, synthetic construct
  source 1..23: mol_type = other RNA
  modified_base 1: mod_base = OTHER; note = 2'-O-methyladenosine-3'-phosphorothioate
  modified_base 2: mod_base = OTHER; note = 2'-deoxy-2'-fluoroadenosine-3'-phosphorothioate
  modified_base 3: mod_base = OTHER; note = 2'-O-methylguanosine-3'-phosphate
  modified_base 4: mod_base = OTHER; note = 2'-O-methyladenosine-3'-phosphate
  modified_base 5: mod_base = OTHER; note = 2'-O-methyluridine-3'-phosphate
  modified_base 6: mod_base = OTHER; note = 2'-deoxy-2'-fluoroadenosine-3'-phosphate
  modified_base 7: mod_base = OTHER; note = 2'-O-methylcytidine-3'-phosphate
  modified_base 8: mod_base = OTHER; note = 2'-deoxy-2'-fluorouridine-3'-phosphate
  modified_base 9: mod_base = OTHER; note = 2'-deoxy-2'-fluoroguanosine-3'-phosphate
  modified_base 10: mod_base = OTHER; note = 2'-O-methyladenosine-3'-phosphate
  modified_base 11: mod_base = OTHER; note = 2'-O-methylcytidine-3'-phosphate
  modified_base 12: mod_base = OTHER; note = 2'-O-methyladenosine-3'-phosphate
  modified_base 13: mod_base = OTHER; note = 2'-O-methylcytidine-3'-phosphate
  modified_base 14: mod_base = OTHER; note = 2'-deoxy-2'-fluoroadenosine-3'-phosphate
  modified_base 15: mod_base = OTHER; note = 2'-O-methyluridine-3'-phosphate
  modified_base 16: mod_base = OTHER; note = 2'-deoxy-2'-fluorocytidine-3'-phosphate
  modified_base 17: mod_base = OTHER; note = 2'-O-methyladenosine-3'-phosphate
  modified_base 18: mod_base = OTHER; note = 2'-O-methylguanosine-3'-phosphate
  modified_base 19: mod_base = OTHER; note = 2'-O-methyladenosine-3'-phosphate
  modified_base 20: mod_base = OTHER; note = 2'-O-methyluridine-3'-phosphate
  modified_base 21: mod_base = OTHER; note = 2'-O-methylguanosine-3'-phosphorothioate
  modified_base 22: mod_base = OTHER; note = 2'-O-methyladenosine-3'-phosphorothioate
  modified_base 23: mod_base = OTHER; note = 2'-O-methyladenosine
aagatactgacacatcagatgaa

SEQ ID NO: 1356 - RNA, 23 nt, synthetic construct
  source 1..23: mol_type = other RNA
  modified_base 1: mod_base = OTHER; note = 2'-O-methyladenosine-3'-phosphorothioate
  modified_base 2: mod_base = OTHER; note = 2'-deoxy-2'-fluoroadenosine-3'-phosphorothioate
  modified_base 3: mod_base = OTHER; note = 2'-O-methyluridine-3'-phosphate
  modified_base 4: mod_base = OTHER; note = 2'-O-methylcytidine-3'-phosphate
  modified_base 5: mod_base = OTHER; note = 2'-O-methyladenosine-3'-phosphate
  modified_base 6: mod_base = OTHER; note = 2'-deoxy-2'-fluoroadenosine-3'-phosphate
  modified_base 7: mod_base = OTHER; note = 2'-O-methylcytidine-3'-phosphate
  modified_base 8: mod_base = OTHER; note = 2'-deoxy-2'-fluoroadenosine-3'-phosphate
  modified_base 9: mod_base = OTHER; note = 2'-deoxy-2'-fluoroguanosine-3'-phosphate
  modified_base 10: mod_base = OTHER; note = 2'-O-methyladenosine-3'-phosphate
  modified_base 11: mod_base = OTHER; note = 2'-O-methyluridine-3'-phosphate
  modified_base 12: mod_base = OTHER; note = 2'-O-methyladenosine-3'-phosphate
  modified_base 13: mod_base = OTHER; note = 2'-O-methylcytidine-3'-phosphate
  modified_base 14: mod_base = OTHER; note = 2'-deoxy-2'-fluorouridine-3'-phosphate
  modified_base 15: mod_base = OTHER; note = 2'-O-methylguanosine-3'-phosphate
  modified_base 16: mod_base = OTHER; note = 2'-deoxy-2'-fluoroadenosine-3'-phosphate
  modified_base 17: mod_base = OTHER; note = 2'-O-methylcytidine-3'-phosphate
  modified_base 18: mod_base = OTHER; note = 2'-O-methyladenosine-3'-phosphate
  modified_base 19: mod_base = OTHER; note = 2'-O-methylcytidine-3'-phosphate
  modified_base 20: mod_base = OTHER; note = 2'-O-methyladenosine-3'-phosphate
  modified_base 21: mod_base = OTHER; note = 2'-O-methyluridine-3'-phosphorothioate
  modified_base 22: mod_base = OTHER; note = 2'-O-methylcytidine-3'-phosphorothioate
  modified_base 23: mod_base = OTHER; note = 2'-O-methyladenosine
aatcaacagatactgacacatca

SEQ ID NO: 1357 - RNA, 23 nt, synthetic construct
  source 1..23: mol_type = other RNA
  modified_base 1: mod_base = OTHER; note = 2'-O-methyladenosine-3'-phosphorothioate
  modified_base 2: mod_base = OTHER; note = 2'-deoxy-2'-fluoroadenosine-3'-phosphorothioate
  modified_base 3: mod_base = OTHER; note = 2'-O-methyladenosine-3'-phosphate
  modified_base 4: mod_base = OTHER; note = 2'-O-methylguanosine-3'-phosphate
  modified_base 5: mod_base = OTHER; note = 2'-O-methylcytidine-3'-phosphate
  modified_base 6: mod_base = OTHER; note = 2'-deoxy-2'-fluoroadenosine-3'-phosphate
  modified_base 7: mod_base = OTHER; note = 2'-O-methyladenosine-3'-phosphate
  modified_base 8: mod_base = OTHER; note = 2'-deoxy-2'-fluoroadenosine-3'-phosphate
  modified_base 9: mod_base = OTHER; note = 2'-deoxy-2'-fluorouridine-3'-phosphate
  modified_base 10: mod_base = OTHER; note = 2'-O-methylcytidine-3'-phosphate
  modified_base 11: mod_base = OTHER; note = 2'-O-methyladenosine-3'-phosphate
  modified_base 12: mod_base = OTHER; note = 2'-O-methyladenosine-3'-phosphate
  modified_base 13: mod_base = OTHER; note = 2'-O-methylcytidine-3'-phosphate
  modified_base 14: mod_base = OTHER; note = 2'-deoxy-2'-fluoroadenosine-3'-phosphate
  modified_base 15: mod_base = OTHER; note = 2'-O-methylguanosine-3'-phosphate
  modified_base 16: mod_base = OTHER; note = 2'-deoxy-2'-fluoroadenosine-3'-phosphate
  modified_base 17: mod_base = OTHER; note = 2'-O-methyluridine-3'-phosphate
  modified_base 18: mod_base = OTHER; note = 2'-O-methyladenosine-3'-phosphate
  modified_base 19: mod_base = OTHER; note = 2'-O-methylcytidine-3'-phosphate
  modified_base 20: mod_base = OTHER; note = 2'-O-methyluridine-3'-phosphate
  modified_base 21: mod_base = OTHER; note = 2'-O-methylguanosine-3'-phosphorothioate
  modified_base 22: mod_base = OTHER; note = 2'-O-methyladenosine-3'-phosphorothioate
  modified_base 23: mod_base = OTHER; note = 2'-O-methylcytidine
aaagcaaatcaacagatactgac

SEQ ID NO: 1358 - RNA, 23 nt, synthetic construct
  source 1..23: mol_type = other RNA
  modified_base 1: mod_base = OTHER; note = 2'-O-methyladenosine-3'-phosphorothioate
  modified_base 2: mod_base = OTHER; note = 2'-deoxy-2'-fluoroadenosine-3'-phosphorothioate
  modified_base 3: mod_base = OTHER; note = 2'-O-methyladenosine-3'-phosphate
  modified_base 4: mod_base = OTHER; note = 2'-O-methyladenosine-3'-phosphate
  modified_base 5: mod_base = OTHER; note = 2'-O-methylcytidine-3'-phosphate
  modified_base 6: mod_base = OTHER; note = 2'-deoxy-2'-fluorouridine-3'-phosphate
  modified_base 7: mod_base = OTHER; note = 2'-O-methyladenosine-3'-phosphate
  modified_base 8: mod_base = OTHER; note = 2'-deoxy-2'-fluorocytidine-3'-phosphate
  modified_base 9: mod_base = OTHER; note = 2'-deoxy-2'-fluoroadenosine-3'-phosphate
  modified_base 10: mod_base = OTHER; note = 2'-O-methyladenosine-3'-phosphate
  modified_base 11: mod_base = OTHER; note = 2'-O-methyladenosine-3'-phosphate
  modified_base 12: mod_base = OTHER; note = 2'-O-methylguanosine-3'-phosphate
  modified_base 13: mod_base = OTHER; note = 2'-O-methylcytidine-3'-phosphate
  modified_base 14: mod_base = OTHER; note = 2'-deoxy-2'-fluoroadenosine-3'-phosphate
  modified_base 15: mod_base = OTHER; note = 2'-O-methyladenosine-3'-phosphate
  modified_base 16: mod_base = OTHER; note = 2'-deoxy-2'-fluoroadenosine-3'-phosphate
  modified_base 17: mod_base = OTHER; note = 2'-O-methyluridine-3'-phosphate
  modified_base 18: mod_base = OTHER; note = 2'-O-methylcytidine-3'-phosphate
  modified_base 19: mod_base = OTHER; note = 2'-O-methyladenosine-3'-phosphate
  modified_base 20: mod_base = OTHER; note = 2'-O-methyladenosine-3'-phosphate
  modified_base 21: mod_base = OTHER; note = 2'-O-methylcytidine-3'-phosphorothioate
  modified_base 22: mod_base = OTHER; note = 2'-O-methyladenosine-3'-phosphorothioate
  modified_base 23: mod_base = OTHER; note = 2'-O-methylguanosine
aaaactacaaagcaaatcaacag

SEQ ID NO: 1359 - RNA, 23 nt, synthetic construct
  source 1..23: mol_type = other RNA
  modified_base 1: mod_base = OTHER; note = 2'-O-methyladenosine-3'-phosphorothioate
  modified_base 2: mod_base = OTHER; note = 2'-deoxy-2'-fluoroadenosine-3'-phosphorothioate
  modified_base 3: mod_base = OTHER; note = 2'-O-methyluridine-3'-phosphate
  modified_base 4: mod_base = OTHER; note = 2'-O-methylguanosine-3'-phosphate
  modified_base 5: mod_base = OTHER; note = 2'-O-methyluridine-3'-phosphate
  modified_base 6: mod_base = OTHER; note = 2'-deoxy-2'-fluorocytidine-3'-phosphate
  modified_base 7: mod_base = OTHER; note = 2'-O-methyladenosine-3'-phosphate
  modified_base 8: mod_base = OTHER; note = 2'-deoxy-2'-fluoroadenosine-3'-phosphate
  modified_base 9: mod_base = OTHER; note = 2'-deoxy-2'-fluorocytidine-3'-phosphate
  modified_base 10: mod_base = OTHER; note = 2'-O-methyladenosine-3'-phosphate
  modified_base 11: mod_base = OTHER; note = 2'-O-methyladenosine-3'-phosphate
  modified_base 12: mod_base = OTHER; note = 2'-O-methyladenosine-3'-phosphate
  modified_base 13: mod_base = OTHER; note = 2'-O-methylcytidine-3'-phosphate
  modified_base 14: mod_base = OTHER; note = 2'-deoxy-2'-fluorouridine-3'-phosphate
  modified_base 15: mod_base = OTHER; note = 2'-O-methyladenosine-3'-phosphate
  modified_base 16: mod_base = OTHER; note = 2'-deoxy-2'-fluorocytidine-3'-phosphate
  modified_base 17: mod_base = OTHER; note = 2'-O-methyladenosine-3'-phosphate
  modified_base 18: mod_base = OTHER; note = 2'-O-methyladenosine-3'-phosphate
  modified_base 19: mod_base = OTHER; note = 2'-O-methyladenosine-3'-phosphate
  modified_base 20: mod_base = OTHER; note = 2'-O-methylguanosine-3'-phosphate
  modified_base 21: mod_base = OTHER; note = 2'-O-methylcytidine-3'-phosphorothioate
  modified_base 22: mod_base = OTHER; note = 2'-O-methyladenosine-3'-phosphorothioate
  modified_base 23: mod_base = OTHER; note = 2'-O-methyladenosine
aatgtcaacaaactacaaagcaa

SEQ ID NO: 1360 - RNA, 23 nt, synthetic construct
  source 1..23: mol_type = other RNA
  modified_base 1: mod_base = OTHER; note = 2'-O-methyladenosine-3'-phosphorothioate
  modified_base 2: mod_base = OTHER; note = 2'-deoxy-2'-fluorouridine-3'-phosphorothioate
  modified_base 3: mod_base = OTHER; note = 2'-O-methyluridine-3'-phosphate
  modified_base 4: mod_base = OTHER; note = 2'-O-methyladenosine-3'-phosphate
  modified_base 5: mod_base = OTHER; note = 2'-O-methyladenosine-3'-phosphate
  modified_base 6: mod_base = OTHER; note = 2'-deoxy-2'-fluoroguanosine-3'-phosphate
  modified_base 7: mod_base = OTHER; note = 2'-O-methyladenosine-3'-phosphate
  modified_base 8: mod_base = OTHER; note = 2'-deoxy-2'-fluorouridine-3'-phosphate
  modified_base 9: mod_base = OTHER; note = 2'-deoxy-2'-fluoroguanosine-3'-phosphate
  modified_base 10: mod_base = OTHER; note = 2'-O-methyluridine-3'-phosphate
  modified_base 11: mod_base = OTHER; note = 2'-O-methylcytidine-3'-phosphate
  modified_base 12: mod_base = OTHER; note = 2'-O-methyladenosine-3'-phosphate
  modified_base 13: mod_base = OTHER; note = 2'-O-methyladenosine-3'-phosphate
  modified_base 14: mod_base = OTHER; note = 2'-deoxy-2'-fluorocytidine-3'-phosphate
  modified_base 15: mod_base = OTHER; note = 2'-O-methyladenosine-3'-phosphate
  modified_base 16: mod_base = OTHER; note = 2'-deoxy-2'-fluoroadenosine-3'-phosphate
  modified_base 17: mod_base = OTHER; note = 2'-O-methyladenosine-3'-phosphate
  modified_base 18: mod_base = OTHER; note = 2'-O-methylcytidine-3'-phosphate
  modified_base 19: mod_base = OTHER; note = 2'-O-methyluridine-3'-phosphate
  modified_base 20: mod_base = OTHER; note = 2'-O-methyladenosine-3'-phosphate
  modified_base 21: mod_base = OTHER; note = 2'-O-methylcytidine-3'-phosphorothioate
  modified_base 22: mod_base = OTHER; note = 2'-O-methyladenosine-3'-phosphorothioate
  modified_base 23: mod_base = OTHER; note = 2'-O-methyladenosine
attaagatgtcaacaaactacaa

SEQ ID NO: 1361 - RNA, 23 nt, synthetic construct
  source 1..23: mol_type = other RNA
  modified_base 1: mod_base = OTHER; note = 2'-O-methyladenosine-3'-phosphorothioate
  modified_base 2: mod_base = OTHER; note = 2'-deoxy-2'-fluoroadenosine-3'-phosphorothioate
  modified_base 3: mod_base = OTHER; note = 2'-O-methyladenosine-3'-phosphate
  modified_base 4: mod_base = OTHER; note = 2'-O-methyladenosine-3'-phosphate
  modified_base 5: mod_base = OTHER; note = 2'-O-methyluridine-3'-phosphate
  modified_base 6: mod_base = OTHER; note = 2'-deoxy-2'-fluorocytidine-3'-phosphate
  modified_base 7: mod_base = OTHER; note = 2'-O-methyluridine-3'-phosphate
  modified_base 8: mod_base = OTHER; note = 2'-deoxy-2'-fluorouridine-3'-phosphate
  modified_base 9: mod_base = OTHER; note = 2'-deoxy-2'-fluoroadenosine-3'-phosphate
  modified_base 10: mod_base = OTHER; note = 2'-O-methyladenosine-3'-phosphate
  modified_base 11: mod_base = OTHER; note = 2'-O-methylguanosine-3'-phosphate
  modified_base 12: mod_base = OTHER; note = 2'-O-methyladenosine-3'-phosphate
  modified_base 13: mod_base = OTHER; note = 2'-O-methyluridine-3'-phosphate
  modified_base 14: mod_base = OTHER; note = 2'-deoxy-2'-fluoroguanosine-3'-phosphate
  modified_base 15: mod_base = OTHER; note = 2'-O-methyluridine-3'-phosphate
  modified_base 16: mod_base = OTHER; note = 2'-deoxy-2'-fluorocytidine-3'-phosphate
  modified_base 17: mod_base = OTHER; note = 2'-O-methyladenosine-3'-phosphate
  modified_base 18: mod_base = OTHER; note = 2'-O-methyladenosine-3'-phosphate
  modified_base 19: mod_base = OTHER; note = 2'-O-methylcytidine-3'-phosphate
  modified_base 20: mod_base = OTHER; note = 2'-O-methyladenosine-3'-phosphate
  modified_base 21: mod_base = OTHER; note = 2'-O-methyladenosine-3'-phosphorothioate
  modified_base 22: mod_base = OTHER; note = 2'-O-methyladenosine-3'-phosphorothioate
  modified_base 23: mod_base = OTHER; note = 2'-O-methylcytidine
aaaatcttaagatgtcaacaaac

SEQ ID NO: 1362 - RNA, 23 nt, synthetic construct
  source 1..23: mol_type = other RNA
  modified_base 1: mod_base = OTHER; note = 2'-O-methyladenosine-3'-phosphorothioate
  modified_base 2: mod_base = OTHER; note = 2'-deoxy-2'-fluoroadenosine-3'-phosphorothioate
  modified_base 3: mod_base = OTHER; note = 2'-O-methylcytidine-3'-phosphate
  modified_base 4: mod_base = OTHER; note = 2'-O-methyladenosine-3'-phosphate
  modified_base 5: mod_base = OTHER; note = 2'-O-methyluridine-3'-phosphate
  modified_base 6: mod_base = OTHER; note = 2'-deoxy-2'-fluorocytidine-3'-phosphate
  modified_base 7: mod_base = OTHER; note = 2'-O-methyladenosine-3'-phosphate
  modified_base 8: mod_base = OTHER; note = 2'-deoxy-2'-fluoroadenosine-3'-phosphate
  modified_base 9: mod_base = OTHER; note = 2'-deoxy-2'-fluoroadenosine-3'-phosphate
  modified_base 10: mod_base = OTHER; note = 2'-O-methyluridine-3'-phosphate
  modified_base 11: mod_base = OTHER; note = 2'-O-methylcytidine-3'-phosphate
  modified_base 12: mod_base = OTHER; note = 2'-O-methyluridine-3'-phosphate
  modified_base 13: mod_base = OTHER; note = 2'-O-methyluridine-3'-phosphate
  modified_base 14: mod_base = OTHER; note = 2'-deoxy-2'-fluoroadenosine-3'-phosphate
  modified_base 15: mod_base = OTHER; note = 2'-O-methyladenosine-3'-phosphate
  modified_base 16: mod_base = OTHER; note = 2'-deoxy-2'-fluoroguanosine-3'-phosphate
  modified_base 17: mod_base = OTHER; note = 2'-O-methyladenosine-3'-phosphate
  modified_base 18: mod_base = OTHER; note = 2'-O-methyluridine-3'-phosphate
  modified_base 19: mod_base = OTHER; note = 2'-O-methylguanosine-3'-phosphate
  modified_base 20: mod_base = OTHER; note = 2'-O-methyluridine-3'-phosphate
  modified_base 21: mod_base = OTHER; note = 2'-O-methylcytidine-3'-phosphorothioate
  modified_base 22: mod_base = OTHER; note = 2'-O-methyladenosine-3'-phosphorothioate
  modified_base 23: mod_base = OTHER; note = 2'-O-methyladenosine
aacatcaaatcttaagatgtcaa

SEQ ID NO: 1363 - RNA, 23 nt, synthetic construct
  source 1..23: mol_type = other RNA
  modified_base 1: mod_base = OTHER; note = 2'-O-methyladenosine-3'-phosphorothioate
  modified_base 2: mod_base = OTHER; note = 2'-deoxy-2'-fluoroadenosine-3'-phosphorothioate
  modified_base 3: mod_base = OTHER; note = 2'-O-methylcytidine-3'-phosphate
  modified_base 4: mod_base = OTHER; note = 2'-O-methyluridine-3'-phosphate
  modified_base 5: mod_base = OTHER; note = 2'-O-methyluridine-3'-phosphate
  modified_base 6: mod_base = OTHER; note = 2'-deoxy-2'-fluorouridine-3'-phosphate
  modified_base 7: mod_base = OTHER; note = 2'-O-methylcytidine-3'-phosphate
  modified_base 8: mod_base = OTHER; note = 2'-deoxy-2'-fluoroadenosine-3'-phosphate
  modified_base 9: mod_base = OTHER; note = 2'-deoxy-2'-fluorocytidine-3'-phosphate
  modified_base 10: mod_base = OTHER; note = 2'-O-methyladenosine-3'-phosphate
  modified_base 11: mod_base = OTHER; note = 2'-O-methyluridine-3'-phosphate
  modified_base 12: mod_base = OTHER; note = 2'-O-methylcytidine-3'-phosphate
  modified_base 13: mod_base = OTHER; note = 2'-O-methyladenosine-3'-phosphate
  modified_base 14: mod_base = OTHER; note = 2'-deoxy-2'-fluoroadenosine-3'-phosphate
  modified_base 15: mod_base = OTHER; note = 2'-O-methyladenosine-3'-phosphate
  modified_base 16: mod_base = OTHER; note = 2'-deoxy-2'-fluorouridine-3'-phosphate
  modified_base 17: mod_base = OTHER; note = 2'-O-methylcytidine-3'-phosphate
  modified_base 18: mod_base = OTHER; note = 2'-O-methyluridine-3'-phosphate
  modified_base 19: mod_base = OTHER; note = 2'-O-methyluridine-3'-phosphate
  modified_base 20: mod_base = OTHER; note = 2'-O-methyladenosine-3'-phosphate
  modified_base 21: mod_base = OTHER; note = 2'-O-methyladenosine-3'-phosphorothioate
  modified_base 22: mod_base = OTHER; note = 2'-O-methylguanosine-3'-phosphorothioate
  modified_base 23: mod_base = OTHER; note = 2'-O-methyladenosine
aactttcacatcaaatcttaaga

SEQ ID NO: 1364 - RNA, 23 nt, synthetic construct
  source 1..23: mol_type = other RNA
  modified_base 1: mod_base = OTHER; note = 2'-O-methyladenosine-3'-phosphorothioate
  modified_base 2: mod_base = OTHER; note = 2'-deoxy-2'-fluorouridine-3'-phosphorothioate
  modified_base 3: mod_base = OTHER; note = 2'-O-methylcytidine-3'-phosphate
  modified_base 4: mod_base = OTHER; note = 2'-O-methyluridine-3'-phosphate
  modified_base 5: mod_base = OTHER; note = 2'-O-methyladenosine-3'-phosphate
  modified_base 6: mod_base = OTHER; note = 2'-deoxy-2'-fluoroadenosine-3'-phosphate
  modified_base 7: mod_base = OTHER; note = 2'-O-methyladenosine-3'-phosphate
  modified_base 8: mod_base = OTHER; note = 2'-deoxy-2'-fluoroadenosine-3'-phosphate
  modified_base 9: mod_base = OTHER; note = 2'-deoxy-2'-fluorocytidine-3'-phosphate
  modified_base 10: mod_base = OTHER; note = 2'-O-methyluridine-3'-phosphate
  modified_base 11: mod_base = OTHER; note = 2'-O-methyluridine-3'-phosphate
  modified_base 12: mod_base = OTHER; note = 2'-O-methyluridine-3'-phosphate
  modified_base 13: mod_base = OTHER; note = 2'-O-methylcytidine-3'-phosphate
  modified_base 14: mod_base = OTHER; note = 2'-deoxy-2'-fluoroadenosine-3'-phosphate
  modified_base 15: mod_base = OTHER; note = 2'-O-methylcytidine-3'-phosphate
  modified_base 16: mod_base = OTHER; note = 2'-deoxy-2'-fluoroadenosine-3'-phosphate
  modified_base 17: mod_base = OTHER; note = 2'-O-methyluridine-3'-phosphate
  modified_base 18: mod_base = OTHER; note = 2'-O-methylcytidine-3'-phosphate
  modified_base 19: mod_base = OTHER; note = 2'-O-methyladenosine-3'-phosphate
  modified_base 20: mod_base = OTHER; note = 2'-O-methyladenosine-3'-phosphate
  modified_base 21: mod_base = OTHER; note = 2'-O-methyladenosine-3'-phosphorothioate
  modified_base 22: mod_base = OTHER; note = 2'-O-methyluridine-3'-phosphorothioate
  modified_base 23: mod_base = OTHER; note = 2'-O-methylcytidine
atctaaaactttcacatcaaatc

SEQ ID NO: 1365 - RNA, 23 nt, synthetic construct
  source 1..23: mol_type = other RNA
  modified_base 1: mod_base = OTHER; note = 2'-O-methyluridine-3'-phosphorothioate 5'-(E)-Vinylphosphonate
  modified_base 2: mod_base = OTHER; note = 2'-deoxy-2'-fluoroadenosine-3'-phosphorothioate
  modified_base 3: mod_base = OTHER; note = 2'-O-methylcytidine-3'-phosphate
  modified_base 4: mod_base = OTHER; note = 2'-O-methyluridine-3'-phosphate
  modified_base 5: mod_base = OTHER; note = 2'-O-methyladenosine-3'-phosphate
  modified_base 6: mod_base = OTHER; note = 2'-deoxy-2'-fluoroguanosine-3'-phosphate
  modified_base 7: mod_base = OTHER; note = 2'-O-methyladenosine-3'-phosphate
  modified_base 8: mod_base = OTHER; note = 2'-deoxy-2'-fluoroguanosine-3'-phosphate
  modified_base 9: mod_base = OTHER; note = 2'-deoxy-2'-fluoroguanosine-3'-phosphate
  modified_base 10: mod_base = OTHER; note = 2'-O-methylcytidine-3'-phosphate
  modified_base 11: mod_base = OTHER; note = 2'-O-methyladenosine-3'-phosphate
  modified_base 12: mod_base = OTHER; note = 2'-O-methyluridine-3'-phosphate
  modified_base 13: mod_base = OTHER; note = 2'-O-methylcytidine-3'-phosphate
  modified_base 14: mod_base = OTHER; note = 2'-deoxy-2'-fluoroadenosine-3'-phosphate
  modified_base 15: mod_base = OTHER; note = 2'-O-methyluridine-3'-phosphate
  modified_base 16: mod_base = OTHER; note = 2'-deoxy-2'-fluorocytidine-3'-phosphate
  modified_base 17: mod_base = OTHER; note = 2'-O-methylguanosine-3'-phosphate
  modified_base 18: mod_base = OTHER; note = 2'-O-methylcytidine-3'-phosphate
  modified_base 19: mod_base = OTHER; note = 2'-O-methylcytidine-3'-phosphate
  modified_base 20: mod_base = OTHER; note = 2'-O-methyladenosine-3'-phosphate
  modified_base 21: mod_base = OTHER; note = 2'-O-methyluridine-3'-phosphorothioate
  modified_base 22: mod_base = OTHER; note = 2'-O-methylcytidine-3'-phosphorothioate
  modified_base 23: mod_base = OTHER; note = 2'-O-methylguanosine
tactagaggcatcatcgccatcg

SEQ ID NO: 1366 - RNA, 23 nt, synthetic construct
  source 1..23: mol_type = other RNA
  modified_base 1: mod_base = OTHER; note = 2'-O-methyluridine-3'-phosphorothioate 5'-(E)-Vinylphosphonate
  modified_base 2: mod_base = OTHER; note = 2'-deoxy-2'-fluoroadenosine-3'-phosphorothioate
  modified_base 3: mod_base = OTHER; note = 2'-O-methyluridine-3'-phosphate
  modified_base 4: mod_base = OTHER; note = 2'-O-methylguanosine-3'-phosphate
  modified_base 5: mod_base = OTHER; note = 2'-O-methylcytidine-3'-phosphate
  modified_base 6: mod_base = OTHER; note = 2'-deoxy-2'-fluoroadenosine-3'-phosphate
  modified_base 7: mod_base = OTHER; note = 2'-O-methylguanosine-3'-phosphate
  modified_base 8: mod_base = OTHER; note = 2'-deoxy-2'-fluoroguanosine-3'-phosphate
  modified_base 9: mod_base = OTHER; note = 2'-deoxy-2'-fluoroadenosine-3'-phosphate
  modified_base 10: mod_base = OTHER; note = 2'-O-methylcytidine-3'-phosphate
  modified_base 11: mod_base = OTHER; note = 2'-O-methyluridine-3'-phosphate
  modified_base 12: mod_base = OTHER; note = 2'-O-methyladenosine-3'-phosphate
  modified_base 13: mod_base = OTHER; note = 2'-O-methylguanosine-3'-phosphate
  modified_base 14: mod_base = OTHER; note = 2'-deoxy-2'-fluoroadenosine-3'-phosphate
  modified_base 15: mod_base = OTHER; note = 2'-O-methylguanosine-3'-phosphate
  modified_base 16: mod_base = OTHER; note = 2'-deoxy-2'-fluoroguanosine-3'-phosphate
  modified_base 17: mod_base = OTHER; note = 2'-O-methylcytidine-3'-phosphate
  modified_base 18: mod_base = OTHER; note = 2'-O-methyladenosine-3'-phosphate
  modified_base 19: mod_base = OTHER; note = 2'-O-methyluridine-3'-phosphate
  modified_base 20: mod_base = OTHER; note = 2'-O-methylcytidine-3'-phosphate
  modified_base 21: mod_base = OTHER; note = 2'-O-methyladenosine-3'-phosphorothioate
  modified_base 22: mod_base = OTHER; note = 2'-O-methyluridine-3'-phosphorothioate
  modified_base 23: mod_base = OTHER; note = 2'-O-methylcytidine
tatgcaggactagaggcatcatc

SEQ ID NO: 1367 - RNA, 23 nt, synthetic construct
  source 1..23: mol_type = other RNA
  modified_base 1: mod_base = OTHER; note = 2'-O-methyluridine-3'-phosphorothioate 5'-(E)-Vinylphosphonate
  modified_base 2: mod_base = OTHER; note = 2'-deoxy-2'-fluoroguanosine-3'-phosphorothioate
  modified_base 3: mod_base = OTHER; note = 2'-O-methylguanosine-3'-phosphate
  modified_base 4: mod_base = OTHER; note = 2'-O-methyladenosine-3'-phosphate
  modified_base 5: mod_base = OTHER; note = 2'-O-methyluridine-3'-phosphate
  modified_base 6: mod_base = OTHER; note = 2'-deoxy-2'-fluoroguanosine-3'-phosphate
  modified_base 7: mod_base = OTHER; note = 2'-O-methyladenosine-3'-phosphate
  modified_base 8: mod_base = OTHER; note = 2'-deoxy-2'-fluorouridine-3'-phosphate
  modified_base 9: mod_base = OTHER; note = 2'-deoxy-2'-fluoroguanosine-3'-phosphate
  modified_base 10: mod_base = OTHER; note = 2'-O-methylcytidine-3'-phosphate
  modified_base 11: mod_base = OTHER; note = 2'-O-methyladenosine-3'-phosphate
  modified_base 12: mod_base = OTHER; note = 2'-O-methylguanosine-3'-phosphate
  modified_base 13: mod_base = OTHER; note = 2'-O-methylguanosine-3'-phosphate
  modified_base 14: mod_base = OTHER; note = 2'-deoxy-2'-fluoroadenosine-3'-phosphate
  modified_base 15: mod_base = OTHER; note = 2'-O-methylcytidine-3'-phosphate
  modified_base 16: mod_base = OTHER; note = 2'-deoxy-2'-fluorouridine-3'-phosphate
  modified_base 17: mod_base = OTHER; note = 2'-O-methyladenosine-3'-phosphate
  modified_base 18: mod_base = OTHER; note = 2'-O-methylguanosine-3'-phosphate
  modified_base 19: mod_base = OTHER; note = 2'-O-methyladenosine-3'-phosphate
  modified_base 20: mod_base = OTHER; note = 2'-O-methylguanosine-3'-phosphate
  modified_base 21: mod_base = OTHER; note = 2'-O-methylguanosine-3'-phosphorothioate
  modified_base 22: mod_base = OTHER; note = 2'-O-methylcytidine-3'-phosphorothioate
  modified_base 23: mod_base = OTHER; note = 2'-O-methyladenosine
tggatgatgcaggactagaggca

SEQ ID NO: 1368 - RNA, 23 nt, synthetic construct
  source 1..23: mol_type = other RNA
  modified_base 1: mod_base = OTHER; note = 2'-O-methyluridine-3'-phosphorothioate 5'-(E)-Vinylphosphonate
  modified_base 2: mod_base = OTHER; note = 2'-deoxy-2'-fluorocytidine-3'-phosphorothioate
  modified_base 3: mod_base = OTHER; note = 2'-O-methylguanosine-3'-phosphate
  modified_base 4: mod_base = OTHER; note = 2'-O-methylcytidine-3'-phosphate
  modified_base 5: mod_base = OTHER; note = 2'-O-methyluridine-3'-phosphate
  modified_base 6: mod_base = OTHER; note = 2'-deoxy-2'-fluorocytidine-3'-phosphate
  modified_base 7: mod_base = OTHER; note = 2'-O-methyluridine-3'-phosphate
  modified_base 8: mod_base = OTHER; note = 2'-deoxy-2'-fluoroguanosine-3'-phosphate
  modified_base 9: mod_base = OTHER; note = 2'-deoxy-2'-fluoroguanosine-3'-phosphate
  modified_base 10: mod_base = OTHER; note = 2'-O-methyladenosine-3'-phosphate
  modified_base 11: mod_base = OTHER; note = 2'-O-methyluridine-3'-phosphate
  modified_base 12: mod_base = OTHER; note = 2'-O-methylguanosine-3'-phosphate
  modified_base 13: mod_base = OTHER; note = 2'-O-methyladenosine-3'-phosphate
  modified_base 14: mod_base = OTHER; note = 2'-deoxy-2'-fluorouridine-3'-phosphate
  modified_base 15: mod_base = OTHER; note = 2'-O-methylguanosine-3'-phosphate
  modified_base 16: mod_base = OTHER; note = 2'-deoxy-2'-fluorocytidine-3'-phosphate
  modified_base 17: mod_base = OTHER; note = 2'-O-methyladenosine-3'-phosphate
  modified_base 18: mod_base = OTHER; note = 2'-O-methylguanosine-3'-phosphate
  modified_base 19: mod_base = OTHER; note = 2'-O-methylguanosine-3'-phosphate
  modified_base 20: mod_base = OTHER; note = 2'-O-methyladenosine-3'-phosphate
  modified_base 21: mod_base = OTHER; note = 2'-O-methylcytidine-3'-phosphorothioate
  modified_base 22: mod_base = OTHER; note = 2'-O-methyluridine-3'-phosphorothioate
  modified_base 23: mod_base = OTHER; note = 2'-O-methyladenosine
tcgctctggatgatgcaggacta

SEQ ID NO: 1369 - RNA, 23 nt, synthetic construct
  source 1..23: mol_type = other RNA
  modified_base 1: mod_base = OTHER; note = 2'-O-methyluridine-3'-phosphorothioate 5'-(E)-Vinylphosphonate
  modified_base 2: mod_base = OTHER; note = 2'-deoxy-2'-fluorouridine-3'-phosphorothioate
  modified_base 3: mod_base = OTHER; note = 2'-O-methylcytidine-3'-phosphate
  modified_base 4: mod_base = OTHER; note = 2'-O-methylcytidine-3'-phosphate
  modified_base 5: mod_base = OTHER; note = 2'-O-methyluridine-3'-phosphate
  modified_base 6: mod_base = OTHER; note = 2'-deoxy-2'-fluorocytidine-3'-phosphate
  modified_base 7: mod_base = OTHER; note = 2'-O-methylcytidine-3'-phosphate
  modified_base 8: mod_base = OTHER; note = 2'-deoxy-2'-fluoroadenosine-3'-phosphate
  modified_base 9: mod_base = OTHER; note = 2'-deoxy-2'-fluorouridine-3'-phosphate
  modified_base 10: mod_base = OTHER; note = 2'-O-methylcytidine-3'-phosphate
  modified_base 11: mod_base = OTHER; note = 2'-O-methyluridine-3'-phosphate
  modified_base 12: mod_base = OTHER; note = 2'-O-methylcytidine-3'-phosphate
  modified_base 13: mod_base = OTHER; note = 2'-O-methylguanosine-3'-phosphate
  modified_base 14: mod_base = OTHER; note = 2'-deoxy-2'-fluorocytidine-3'-phosphate
  modified_base 15: mod_base = OTHER; note = 2'-O-methyladenosine-3'-phosphate
  modified_base 16: mod_base = OTHER; note = 2'-deoxy-2'-fluoroguanosine-3'-phosphate
  modified_base 17: mod_base = OTHER; note = 2'-O-methyluridine-3'-phosphate
  modified_base 18: mod_base = OTHER; note = 2'-O-methylcytidine-3'-phosphate
  modified_base 19: mod_base = OTHER; note = 2'-O-methylcytidine-3'-phosphate
  modified_base 20: mod_base = OTHER; note = 2'-O-methylguanosine-3'-phosphate
  modified_base 21: mod_base = OTHER; note = 2'-O-methylguanosine-3'-phosphorothioate
  modified_base 22: mod_base = OTHER; note = 2'-O-methyladenosine-3'-phosphorothioate
  modified_base 23: mod_base = OTHER; note = 2'-O-methylcytidine
ttcctccatctcgcagtccggac

SEQ ID NO: 1370 - RNA, 23 nt, synthetic construct
  source 1..23: mol_type = other RNA
  modified_base 1: mod_base = OTHER; note = 2'-O-methyluridine-3'-phosphorothioate 5'-(E)-Vinylphosphonate
  modified_base 2: mod_base = OTHER; note = 2'-deoxy-2'-fluoroadenosine-3'-phosphorothioate
  modified_base 3: mod_base = OTHER; note = 2'-O-methylcytidine-3'-phosphate
  modified_base 4: mod_base = OTHER; note = 2'-O-methyladenosine-3'-phosphate
  modified_base 5: mod_base = OTHER; note = 2'-O-methylguanosine-3'-phosphate
  modified_base 6: mod_base = OTHER; note = 2'-deoxy-2'-fluoroadenosine-3'-phosphate
  modified_base 7: mod_base = OTHER; note = 2'-O-methyluridine-3'-phosphate
  modified_base 8: mod_base = OTHER; note = 2'-deoxy-2'-fluoroadenosine-3'-phosphate
  modified_base 9: mod_base = OTHER; note = 2'-deoxy-2'-fluoroadenosine-3'-phosphate
  modified_base 10: mod_base = OTHER; note = 2'-O-methylguanosine-3'-phosphate
  modified_base 11: mod_base = OTHER; note = 2'-O-methylcytidine-3'-phosphate
  modified_base 12: mod_base = OTHER; note = 2'-O-methylcytidine-3'-phosphate
  modified_base 13: mod_base = OTHER; note = 2'-O-methyluridine-3'-phosphate
  modified_base 14: mod_base = OTHER; note = 2'-deoxy-2'-fluoroguanosine-3'-phosphate
  modified_base 15: mod_base = OTHER; note = 2'-O-methylcytidine-3'-phosphate
  modified_base 16: mod_base = OTHER; note = 2'-deoxy-2'-fluorocytidine-3'-phosphate
  modified_base 17: mod_base = OTHER; note = 2'-O-methylguanosine-3'-phosphate
  modified_base 18: mod_base = OTHER; note = 2'-O-methylguanosine-3'-phosphate
  modified_base 19: mod_base = OTHER; note = 2'-O-methylguanosine-3'-phosphate
  modified_base 20: mod_base = OTHER; note = 2'-O-methyluridine-3'-phosphate
  modified_base 21: mod_base = OTHER; note = 2'-O-methylguanosine-3'-phosphorothioate
  modified_base 22: mod_base = OTHER; note = 2'-O-methylguanosine-3'-phosphorothioate
  modified_base 23: mod_base = OTHER; note = 2'-O-methylcytidine
tacagataagcctgccgggtggc

SEQ ID NO: 1371 - RNA, 23 nt, synthetic construct
  source 1..23: mol_type = other RNA
  modified_base 1: mod_base = OTHER; note = 2'-O-methyluridine-3'-phosphorothioate 5'-(E)-Vinylphosphonate
  modified_base 2: mod_base = OTHER; note = 2'-deoxy-2'-fluorocytidine-3'-phosphorothioate
  modified_base 3: mod_base = OTHER; note = 2'-O-methylcytidine-3'-phosphate
  modified_base 4: mod_base = OTHER; note = 2'-O-methyladenosine-3'-phosphate
  modified_base 5: mod_base = OTHER; note = 2'-O-methyladenosine-3'-phosphate
  modified_base 6: mod_base = OTHER; note = 2'-deoxy-2'-fluoroguanosine-3'-phosphate
  modified_base 7: mod_base = OTHER; note = 2'-O-methyladenosine-3'-phosphate
  modified_base 8: mod_base = OTHER; note = 2'-deoxy-2'-fluorocytidine-3'-phosphate
  modified_base 9: mod_base = OTHER; note = 2'-deoxy-2'-fluoroadenosine-3'-phosphate
  modified_base 10: mod_base = OTHER; note = 2'-O-methylguanosine-3'-phosphate
  modified_base 11: mod_base = OTHER; note = 2'-O-methyladenosine-3'-phosphate
  modified_base 12: mod_base = OTHER; note = 2'-O-methyluridine-3'-phosphate
  modified_base 13: mod_base = OTHER; note = 2'-O-methyladenosine-3'-phosphate
  modified_base 14: mod_base = OTHER; note = 2'-deoxy-2'-fluoroadenosine-3'-phosphate
  modified_base 15: mod_base = OTHER; note = 2'-O-methylguanosine-3'-phosphate
  modified_base 16: mod_base = OTHER; note = 2'-deoxy-2'-fluorocytidine-3'-phosphate
  modified_base 17: mod_base = OTHER; note = 2'-O-methylcytidine-3'-phosphate
  modified_base 18: mod_base = OTHER; note = 2'-O-methyluridine-3'-phosphate
  modified_base 19: mod_base = OTHER; note = 2'-O-methylguanosine-3'-phosphate
  modified_base 20: mod_base = OTHER; note = 2'-O-methylcytidine-3'-phosphate
  modified_base 21: mod_base = OTHER; note = 2'-O-methylcytidine-3'-phosphorothioate
  modified_base 22: mod_base = OTHER; note = 2'-O-methylguanosine-3'-phosphorothioate
  modified_base 23: mod_base = OTHER; note = 2'-O-methylguanosine
tccaagacagataagcctgccgg

SEQ ID NO: 1372 - RNA, 23 nt, synthetic construct
  source 1..23: mol_type = other RNA
  modified_base 1: mod_base = OTHER; note = 2'-O-methyluridine-3'-phosphorothioate 5'-(E)-Vinylphosphonate
  modified_base 2: mod_base = OTHER; note = 2'-deoxy-2'-fluoroadenosine-3'-phosphorothioate
  modified_base 3: mod_base = OTHER; note = 2'-O-methyladenosine-3'-phosphate
  modified_base 4: mod_base = OTHER; note = 2'-O-methyladenosine-3'-phosphate
  modified_base 5: mod_base = OTHER; note = 2'-O-methyladenosine-3'-phosphate
  modified_base 6: mod_base = OTHER; note = 2'-deoxy-2'-fluoroguanosine-3'-phosphate
  modified_base 7: mod_base = OTHER; note = 2'-O-methyladenosine-3'-phosphate
  modified_base 8: mod_base = OTHER; note = 2'-deoxy-2'-fluoroguanosine-3'-phosphate
  modified_base 9: mod_base = OTHER; note = 2'-deoxy-2'-fluoroguanosine-3'-phosphate
  modified_base 10: mod_base = OTHER; note = 2'-O-methylcytidine-3'-phosphate
  modified_base 11: mod_base = OTHER; note = 2'-O-methylcytidine-3'-phosphate
  modified_base 12: mod_base = OTHER; note = 2'-O-methylcytidine-3'-phosphate
  modified_base 13: mod_base = OTHER; note = 2'-O-methyladenosine-3'-phosphate
  modified_base 14: mod_base = OTHER; note = 2'-deoxy-2'-fluoroadenosine-3'-phosphate
  modified_base 15: mod_base = OTHER; note = 2'-O-methylguanosine-3'-phosphate
  modified_base 16: mod_base = OTHER; note = 2'-deoxy-2'-fluoroadenosine-3'-phosphate
  modified_base 17: mod_base = OTHER; note = 2'-O-methylcytidine-3'-phosphate
  modified_base 18: mod_base = OTHER; note = 2'-O-methyladenosine-3'-phosphate
  modified_base 19: mod_base = OTHER; note = 2'-O-methylguanosine-3'-phosphate
  modified_base 20: mod_base = OTHER; note = 2'-O-methyladenosine-3'-phosphate
  modified_base 21: mod_base = OTHER; note = 2'-O-methyluridine-3'-phosphorothioate
  modified_base 22: mod_base = OTHER; note = 2'-O-methyladenosine-3'-phosphorothioate
  modified_base 23: mod_base = OTHER; note = 2'-O-methyladenosine
taaaagaggcccaagacagataa

SEQ ID NO: 1373 - RNA, 23 nt, synthetic construct
  source 1..23: mol_type = other RNA
  modified_base 1: mod_base = OTHER; note = 2'-O-methyluridine-3'-phosphorothioate 5'-(E)-Vinylphosphonate
  modified_base 2: mod_base = OTHER; note = 2'-deoxy-2'-fluoroguanosine-3'-phosphorothioate
  modified_base 3: mod_base = OTHER; note = 2'-O-methyluridine-3'-phosphate
  modified_base 4: mod_base = OTHER; note = 2'-O-methylguanosine-3'-phosphate
  modified_base 5: mod_base = OTHER; note = 2'-O-methyladenosine-3'-phosphate
  modified_base 6: mod_base = OTHER; note = 2'-deoxy-2'-fluorocytidine-3'-phosphate
  modified_base 7: mod_base = OTHER; note = 2'-O-methyladenosine-3'-phosphate
  modified_base 8: mod_base = OTHER; note = 2'-deoxy-2'-fluoroadenosine-3'-phosphate
  modified_base 9: mod_base = OTHER; note = 2'-deoxy-2'-fluoroadenosine-3'-phosphate
  modified_base 10: mod_base = OTHER; note = 2'-O-methyladenosine-3'-phosphate
  modified_base 11: mod_base = OTHER; note = 2'-O-methylguanosine-3'-phosphate
  modified_base 12: mod_base = OTHER; note = 2'-O-methyladenosine-3'-phosphate
  modified_base 13: mod_base = OTHER; note = 2'-O-methylguanosine-3'-phosphate
  modified_base 14: mod_base = OTHER; note = 2'-deoxy-2'-fluoroguanosine-3'-phosphate
  modified_base 15: mod_base = OTHER; note = 2'-O-methylcytidine-3'-phosphate
  modified_base 16: mod_base = OTHER; note = 2'-deoxy-2'-fluorocytidine-3'-phosphate
  modified_base 17: mod_base = OTHER; note = 2'-O-methylcytidine-3'-phosphate
  modified_base 18: mod_base = OTHER; note = 2'-O-methyladenosine-3'-phosphate
  modified_base 19: mod_base = OTHER; note = 2'-O-methyladenosine-3'-phosphate
  modified_base 20: mod_base = OTHER; note = 2'-O-methylguanosine-3'-phosphate
  modified_base 21: mod_base = OTHER; note = 2'-O-methyladenosine-3'-phosphorothioate
  modified_base 22: mod_base = OTHER; note = 2'-O-methylcytidine-3'-phosphorothioate
  modified_base 23: mod_base = OTHER; note = 2'-O-methyladenosine
tgtgacaaaagaggcccaagaca

SEQ ID NO: 1374 - RNA, 23 nt, synthetic construct
  source 1..23: mol_type = other RNA
  modified_base 1: mod_base = OTHER; note = 2'-O-methyluridine-3'-phosphorothioate 5'-(E)-Vinylphosphonate
  modified_base 2: mod_base = OTHER; note = 2'-deoxy-2'-fluoroadenosine-3'-phosphorothioate
  modified_base 3: mod_base = OTHER; note = 2'-O-methyladenosine-3'-phosphate
  modified_base 4: mod_base = OTHER; note = 2'-O-methyluridine-3'-phosphate
  modified_base 5: mod_base = OTHER; note = 2'-O-methyladenosine-3'-phosphate
  modified_base 6: mod_base = OTHER; note = 2'-deoxy-2'-fluorouridine-3'-phosphate
  modified_base 7: mod_base = OTHER; note = 2'-O-methylguanosine-3'-phosphate
  modified_base 8: mod_base = OTHER; note = 2'-deoxy-2'-fluorouridine-3'-phosphate
  modified_base 9: mod_base = OTHER; note = 2'-deoxy-2'-fluoroguanosine-3'-phosphate
  modified_base 10: mod_base = OTHER; note = 2'-O-methyladenosine-3'-phosphate
  modified_base 11: mod_base = OTHER; note = 2'-O-methylcytidine-3'-phosphate
  modified_base 12: mod_base = OTHER; note = 2'-O-methyladenosine-3'-phosphate
  modified_base 13: mod_base = OTHER; note = 2'-O-methyladenosine-3'-phosphate
  modified_base 14: mod_base = OTHER; note = 2'-deoxy-2'-fluoroadenosine-3'-phosphate
  modified_base 15: mod_base = OTHER; note = 2'-O-methyladenosine-3'-phosphate
  modified_base 16: mod_base = OTHER; note = 2'-deoxy-2'-fluoroguanosine-3'-phosphate
  modified_base 17: mod_base = OTHER; note = 2'-O-methyladenosine-3'-phosphate
  modified_base 18: mod_base = OTHER; note = 2'-O-methylguanosine-3'-phosphate
  modified_base 19: mod_base = OTHER; note = 2'-O-methylguanosine-3'-phosphate
  modified_base 20: mod_base = OTHER; note = 2'-O-methylcytidine-3'-phosphate
  modified_base 21: mod_base = OTHER; note = 2'-O-methylcytidine-3'-phosphorothioate
  modified_base 22: mod_base = OTHER; note = 2'-O-methylcytidine-3'-phosphorothioate
  modified_base 23: mod_base = OTHER; note = 2'-O-methyladenosine
taatatgtgacaaaagaggccca

SEQ ID NO: 1375 - RNA, 23 nt, synthetic construct
  source 1..23: mol_type = other RNA
  modified_base 1: mod_base = OTHER; note = 2'-O-methyluridine-3'-phosphorothioate 5'-(E)-Vinylphosphonate
  modified_base 2: mod_base = OTHER; note = 2'-deoxy-2'-fluoroadenosine-3'-phosphorothioate
  modified_base 3: mod_base = OTHER; note = 2'-O-methyluridine-3'-phosphate
  modified_base 4: mod_base = OTHER; note = 2'-O-methylguanosine-3'-phosphate
  modified_base 5: mod_base = OTHER; note = 2'-O-methyladenosine-3'-phosphate
  modified_base 6: mod_base = OTHER; note = 2'-deoxy-2'-fluoroguanosine-3'-phosphate
  modified_base 7: mod_base = OTHER; note = 2'-O-methylcytidine-3'-phosphate
  modified_base 8: mod_base = OTHER; note = 2'-deoxy-2'-fluoroadenosine-3'-phosphate
  modified_base 9: mod_base = OTHER; note = 2'-deoxy-2'-fluoroadenosine-3'-phosphate
  modified_base 10: mod_base = OTHER; note = 2'-O-methyluridine-3'-phosphate
  modified_base 11: mod_base = OTHER; note = 2'-O-methyladenosine-3'-phosphate
  modified_base 12: mod_base = OTHER; note = 2'-O-methyluridine-3'-phosphate
  modified_base 13: mod_base = OTHER; note = 2'-O-methylguanosine-3'-phosphate
  modified_base 14: mod_base = OTHER; note = 2'-deoxy-2'-fluorouridine-3'-phosphate
  modified_base 15: mod_base = OTHER; note = 2'-O-methylguanosine-3'-phosphate
  modified_base 16: mod_base = OTHER; note = 2'-deoxy-2'-fluoroadenosine-3'-phosphate
  modified_base 17: mod_base = OTHER; note = 2'-O-methylcytidine-3'-phosphate
  modified_base 18: mod_base = OTHER; note = 2'-O-methyladenosine-3'-phosphate
  modified_base 19: mod_base = OTHER; note = 2'-O-methyladenosine-3'-phosphate
  modified_base 20: mod_base = OTHER; note = 2'-O-methyladenosine-3'-phosphate
  modified_base 21: mod_base = OTHER; note = 2'-O-methyladenosine-3'-phosphorothioate
  modified_base 22: mod_base = OTHER; note = 2'-O-methylguanosine-3'-phosphorothioate
  modified_base 23: mod_base = OTHER; note = 2'-O-methyladenosine
tatgagcaatatgtgacaaaaga

SEQ ID NO: 1376 - RNA, 23 nt, synthetic construct
  source 1..23: mol_type = other RNA
  modified_base 1: mod_base = OTHER; note = 2'-O-methyluridine-3'-phosphorothioate 5'-(E)-Vinylphosphonate
  modified_base 2: mod_base = OTHER; note = 2'-deoxy-2'-fluorouridine-3'-phosphorothioate
  modified_base 3: mod_base = OTHER; note = 2'-O-methylcytidine-3'-phosphate
  modified_base 4: mod_base = OTHER; note = 2'-O-methyladenosine-3'-phosphate
  modified_base 5: mod_base = OTHER; note = 2'-O-methylcytidine-3'-phosphate
  modified_base 6: mod_base = OTHER; note = 2'-deoxy-2'-fluoroadenosine-3'-phosphate
  modified_base 7: mod_base = OTHER; note = 2'-O-methylguanosine-3'-phosphate
  modified_base 8: mod_base = OTHER; note = 2'-deoxy-2'-fluoroadenosine-3'-phosphate
  modified_base 9: mod_base = OTHER; note = 2'-deoxy-2'-fluorouridine-3'-phosphate
  modified_base 10: mod_base = OTHER; note = 2'-O-methylguanosine-3'-phosphate
  modified_base 11: mod_base = OTHER; note = 2'-O-methyladenosine-3'-phosphate
  modified_base 12: mod_base = OTHER; note = 2'-O-methylguanosine-3'-phosphate
  modified_base 13: mod_base = OTHER; note = 2'-O-methylcytidine-3'-phosphate
  modified_base 14: mod_base = OTHER; note = 2'-deoxy-2'-fluoroadenosine-3'-phosphate
  modified_base 15: mod_base = OTHER; note = 2'-O-methyladenosine-3'-phosphate
  modified_base 16: mod_base = OTHER; note = 2'-deoxy-2'-fluorouridine-3'-phosphate
  modified_base 17: mod_base = OTHER; note = 2'-O-methyladenosine-3'-phosphate
  modified_base 18: mod_base = OTHER; note = 2'-O-methyluridine-3'-phosphate
  modified_base 19: mod_base = OTHER; note = 2'-O-methylguanosine-3'-phosphate
  modified_base 20: mod_base = OTHER; note = 2'-O-methyluridine-3'-phosphate
  modified_base 21: mod_base = OTHER; note = 2'-O-methylguanosine-3'-phosphorothioate
  modified_base 22: mod_base = OTHER; note = 2'-O-methyladenosine-3'-phosphorothioate
  modified_base 23: mod_base = OTHER; note = 2'-O-methylcytidine
ttcacagatgagcaatatgtgac

SEQ ID NO: 1377 - RNA, 23 nt, synthetic construct
  source 1..23: mol_type = other RNA
  modified_base 1: mod_base = OTHER; note = 2'-O-methyluridine-3'-phosphorothioate 5'-(E)-Vinylphosphonate
  modified_base 2: mod_base = OTHER; note = 2'-deoxy-2'-fluorouridine-3'-phosphorothioate
  modified_base 3: mod_base = OTHER; note = 2'-O-methylcytidine-3'-phosphate
  modified_base 4: mod_base = OTHER; note = 2'-O-methyladenosine-3'-phosphate
  modified_base 5: mod_base = OTHER; note = 2'-O-methylguanosine-3'-phosphate
  modified_base 6: mod_base = OTHER; note = 2'-deoxy-2'-fluorocytidine-3'-phosphate
  modified_base 7: mod_base = OTHER; note = 2'-O-methyluridine-3'-phosphate
  modified_base 8: mod_base = OTHER; note = 2'-deoxy-2'-fluorocytidine-3'-phosphate
  modified_base 9: mod_base = OTHER; note = 2'-deoxy-2'-fluoroadenosine-3'-phosphate
  modified_base 10: mod_base = OTHER; note = 2'-O-methylcytidine-3'-phosphate
  modified_base 11: mod_base = OTHER; note = 2'-O-methyladenosine-3'-phosphate
  modified_base 12: mod_base = OTHER; note = 2'-O-methylguanosine-3'-phosphate
  modified_base 13: mod_base = OTHER; note = 2'-O-methyladenosine-3'-phosphate
  modified_base 14: mod_base = OTHER; note = 2'-deoxy-2'-fluorouridine-3'-phosphate
  modified_base 15: mod_base = OTHER; note = 2'-O-methylguanosine-3'-phosphate
  modified_base 16: mod_base = OTHER; note = 2'-deoxy-2'-fluoroadenosine-3'-phosphate
  modified_base 17: mod_base = OTHER; note = 2'-O-methylguanosine-3'-phosphate
  modified_base 18: mod_base = OTHER; note = 2'-O-methylcytidine-3'-phosphate
  modified_base 19: mod_base = OTHER; note = 2'-O-methyladenosine-3'-phosphate
  modified_base 20: mod_base = OTHER; note = 2'-O-methyladenosine-3'-phosphate
  modified_base 21: mod_base = OTHER; note = 2'-O-methyluridine-3'-phosphorothioate
  modified_base 22: mod_base = OTHER; note = 2'-O-methyladenosine-3'-phosphorothioate
  modified_base 23: mod_base = OTHER; note = 2'-O-methyluridine
ttcagctcacagatgagcaatat

SEQ ID NO: 1378 - RNA, 23 nt, synthetic construct
  source 1..23: mol_type = other RNA
  modified_base 1: mod_base = OTHER; note = 2'-O-methyluridine-3'-phosphorothioate 5'-(E)-Vinylphosphonate
  modified_base 2: mod_base = OTHER; note = 2'-deoxy-2'-fluoroadenosine-3'-phosphorothioate
  modified_base 3: mod_base = OTHER; note = 2'-O-methylguanosine-3'-phosphate
  modified_base 4: mod_base = OTHER; note = 2'-O-methylguanosine-3'-phosphate
  modified_base 5: mod_base = OTHER; note = 2'-O-methylguanosine-3'-phosphate
  modified_base 6: mod_base = OTHER; note = 2'-deoxy-2'-fluorocytidine-3'-phosphate
  modified_base 7: mod_base = OTHER; note = 2'-O-methylcytidine-3'-phosphate
  modified_base 8: mod_base = OTHER; note = 2'-deoxy-2'-fluorouridine-3'-phosphate
  modified_base 9: mod_base = OTHER; note = 2'-deoxy-2'-fluorocytidine-3'-phosphate
  modified_base 10: mod_base = OTHER; note = 2'-O-methyladenosine-3'-phosphate
  modified_base 11: mod_base = OTHER; note = 2'-O-methylguanosine-3'-phosphate
  modified_base 12: mod_base = OTHER; note = 2'-O-methylcytidine-3'-phosphate
  modified_base 13: mod_base = OTHER; note = 2'-O-methyluridine-3'-phosphate
  modified_base 14: mod_base = OTHER; note = 2'-deoxy-2'-fluorocytidine-3'-phosphate
  modified_base 15: mod_base = OTHER; note = 2'-O-methyladenosine-3'-phosphate
  modified_base 16: mod_base = OTHER; note = 2'-deoxy-2'-fluorocytidine-3'-phosphate
  modified_base 17: mod_base = OTHER; note = 2'-O-methyladenosine-3'-phosphate
  modified_base 18: mod_base = OTHER; note = 2'-O-methylguanosine-3'-phosphate
  modified_base 19: mod_base = OTHER; note = 2'-O-methyladenosine-3'-phosphate
  modified_base 20: mod_base = OTHER; note = 2'-O-methyluridine-3'-phosphate
  modified_base 21: mod_base = OTHER; note = 2'-O-methylguanosine-3'-phosphorothioate
  modified_base 22: mod_base = OTHER; note = 2'-O-methyladenosine-3'-phosphorothioate
  modified_base 23: mod_base = OTHER; note = 2'-O-methylguanosine
tagggcctcagctcacagatgag

SEQ ID NO: 1379 - RNA, 23 nt, synthetic construct
  source 1..23: mol_type = other RNA
  modified_base 1: mod_base = OTHER; note = 2'-O-methyluridine-3'-phosphorothioate 5'-(E)-Vinylphosphonate
  modified_base 2: mod_base = OTHER; note = 2'-deoxy-2'-fluoroadenosine-3'-phosphorothioate
  modified_base 3: mod_base = OTHER; note = 2'-O-methyluridine-3'-phosphate
  modified_base 4: mod_base = OTHER; note = 2'-O-methyladenosine-3'-phosphate
  modified_base 5: mod_base = OTHER; note = 2'-O-methylcytidine-3'-phosphate
  modified_base 6: mod_base = OTHER; note = 2'-deoxy-2'-fluorouridine-3'-phosphate
  modified_base 7: mod_base = OTHER; note = 2'-O-methylcytidine-3'-phosphate
  modified_base 8: mod_base = OTHER; note = 2'-deoxy-2'-fluoroadenosine-3'-phosphate
  modified_base 9: mod_base = OTHER; note = 2'-deoxy-2'-fluoroguanosine-3'-phosphate
  modified_base 10: mod_base = OTHER; note = 2'-O-methyluridine-3'-phosphate
  modified_base 11: mod_base = OTHER; note = 2'-O-methylguanosine-3'-phosphate
  modified_base 12: mod_base = OTHER; note = 2'-O-methyladenosine-3'-phosphate
  modified_base 13: mod_base = OTHER; note = 2'-O-methylguanosine-3'-phosphate
  modified_base 14: mod_base = OTHER; note = 2'-deoxy-2'-fluorouridine-3'-phosphate
  modified_base 15: mod_base = OTHER; note = 2'-O-methylcytidine-3'-phosphate
  modified_base 16: mod_base = OTHER; note = 2'-deoxy-2'-fluoroadenosine-3'-phosphate
  modified_base 17: mod_base = OTHER; note = 2'-O-methylguanosine-3'-phosphate
  modified_base 18: mod_base = OTHER; note = 2'-O-methylguanosine-3'-phosphate
  modified_base 19: mod_base = OTHER; note = 2'-O-methylguanosine-3'-phosphate
  modified_base 20: mod_base = OTHER; note = 2'-O-methylcytidine-3'-phosphate
  modified_base 21: mod_base = OTHER; note = 2'-O-methylcytidine-3'-phosphorothioate
  modified_base 22: mod_base = OTHER; note = 2'-O-methyluridine-3'-phosphorothioate
  modified_base 23: mod_base = OTHER; note = 2'-O-methylcytidine
tatactcagtgagtcagggcctc

SEQ ID NO: 1380 - RNA, 23 nt, synthetic construct
  source 1..23: mol_type = other RNA
  modified_base 1: mod_base = OTHER; note = 2'-O-methyluridine-3'-phosphorothioate 5'-(E)-Vinylphosphonate
  modified_base 2: mod_base = OTHER; note = 2'-deoxy-2'-fluorocytidine-3'-phosphorothioate
  modified_base 3: mod_base = OTHER; note = 2'-O-methyladenosine-3'-phosphate
  modified_base 4: mod_base = OTHER; note = 2'-O-methyladenosine-3'-phosphate
  modified_base 5: mod_base = OTHER; note = 2'-O-methyladenosine-3'-phosphate
  modified_base 6: mod_base = OTHER; note = 2'-deoxy-2'-fluoroadenosine-3'-phosphate
  modified_base 7: mod_base = OTHER; note = 2'-O-methyladenosine-3'-phosphate
  modified_base 8: mod_base = OTHER; note = 2'-deoxy-2'-fluorouridine-3'-phosphate
  modified_base 9: mod_base = OTHER; note = 2'-deoxy-2'-fluoroadenosine-3'-phosphate
  modified_base 10: mod_base = OTHER; note = 2'-O-methylcytidine-3'-phosphate
  modified_base 11: mod_base = OTHER; note = 2'-O-methyluridine-3'-phosphate
  modified_base 12: mod_base = OTHER; note = 2'-O-methylcytidine-3'-phosphate
  modified_base 13: mod_base = OTHER; note = 2'-O-methyladenosine-3'-phosphate
  modified_base 14: mod_base = OTHER; note = 2'-deoxy-2'-fluoroguanosine-3'-phosphate
  modified_base 15: mod_base = OTHER; note = 2'-O-methyluridine-3'-phosphate
  modified_base 16: mod_base = OTHER; note = 2'-deoxy-2'-fluoroguanosine-3'-phosphate
  modified_base 17: mod_base = OTHER; note = 2'-O-methyladenosine-3'-phosphate
  modified_base 18: mod_base = OTHER; note = 2'-O-methylguanosine-3'-phosphate
  modified_base 19: mod_base = OTHER; note = 2'-O-methyluridine-3'-phosphate
  modified_base 20: mod_base = OTHER; note = 2'-O-methylcytidine-3'-phosphate
  modified_base 21: mod_base = OTHER; note = 2'-O-methyladenosine-3'-phosphorothioate
  modified_base 22: mod_base = OTHER; note = 2'-O-methylguanosine-3'-phosphorothioate
  modified_base 23: mod_base = OTHER; note = 2'-O-methylguanosine
tcaaaaatactcagtgagtcagg

SEQ ID NO: 1381 - RNA, 23 nt, synthetic construct
  source 1..23: mol_type = other RNA
  modified_base 1: mod_base = OTHER; note = 2'-O-methyluridine-3'-phosphorothioate 5'-(E)-Vinylphosphonate
  modified_base 2: mod_base = OTHER; note = 2'-deoxy-2'-fluoroadenosine-3'-phosphorothioate
  modified_base 3: mod_base = OTHER; note = 2'-O-methyladenosine-3'-phosphate
  modified_base 4: mod_base = OTHER; note = 2'-O-methyluridine-3'-phosphate
  modified_base 5: mod_base = OTHER; note = 2'-O-methylguanosine-3'-phosphate
  modified_base 6: mod_base = OTHER; note = 2'-deoxy-2'-fluorouridine-3'-phosphate
  modified_base 7: mod_base = OTHER; note = 2'-O-methylcytidine-3'-phosphate
  modified_base 8: mod_base = OTHER; note = 2'-deoxy-2'-fluorouridine-3'-phosphate
  modified_base 9: mod_base = OTHER; note = 2'-deoxy-2'-fluorocytidine-3'-phosphate
  modified_base 10: mod_base = OTHER; note = 2'-O-methylcytidine-3'-phosphate
  modified_base 11: mod_base = OTHER; note = 2'-O-methyluridine-3'-phosphate
  modified_base 12: mod_base = OTHER; note = 2'-O-methyluridine-3'-phosphate
  modified_base 13: mod_base = OTHER; note = 2'-O-methylcytidine-3'-phosphate
  modified_base 14: mod_base = OTHER; note = 2'-deoxy-2'-fluorouridine-3'-phosphate
  modified_base 15: mod_base = OTHER; note = 2'-O-methyluridine-3'-phosphate
  modified_base 16: mod_base = OTHER; note = 2'-deoxy-2'-fluorocytidine-3'-phosphate
  modified_base 17: mod_base = OTHER; note = 2'-O-methyluridine-3'-phosphate
  modified_base 18: mod_base = OTHER; note = 2'-O-methylguanosine-3'-phosphate
  modified_base 19: mod_base = OTHER; note = 2'-O-methylcytidine-3'-phosphate
  modified_base 20: mod_base = OTHER; note = 2'-O-methyluridine-3'-phosphate
  modified_base 21: mod_base = OTHER; note = 2'-O-methylcytidine-3'-phosphorothioate
  modified_base 22: mod_base = OTHER; note = 2'-O-methylcytidine-3'-phosphorothioate
  modified_base 23: mod_base = OTHER; note = 2'-O-methylcytidine
taatgtctccttcttctgctccc

SEQ ID NO: 1382 - RNA, 23 nt, synthetic construct
  source 1..23: mol_type = other RNA
  modified_base 1: mod_base = OTHER; note = 2'-O-methyluridine-3'-phosphorothioate 5'-(E)-Vinylphosphonate
  modified_base 2: mod_base = OTHER; note = 2'-deoxy-2'-fluoroadenosine-3'-phosphorothioate
  modified_base 3: mod_base = OTHER; note = 2'-O-methylguanosine-3'-phosphate
  modified_base 4: mod_base = OTHER; note = 2'-O-methyladenosine-3'-phosphate
  modified_base 5: mod_base = OTHER; note = 2'-O-methylguanosine-3'-phosphate
  modified_base 6: mod_base = OTHER; note = 2'-deoxy-2'-fluoroadenosine-3'-phosphate
  modified_base 7: mod_base = OTHER; note = 2'-O-methyladenosine-3'-phosphate
  modified_base 8: mod_base = OTHER; note = 2'-deoxy-2'-fluoroadenosine-3'-phosphate
  modified_base 9: mod_base = OTHER; note = 2'-deoxy-2'-fluorouridine-3'-phosphate
  modified_base 10: mod_base = OTHER; note = 2'-O-methylguanosine-3'-phosphate
  modified_base 11: mod_base = OTHER; note = 2'-O-methyluridine-3'-phosphate
  modified_base 12: mod_base = OTHER; note = 2'-O-methylcytidine-3'-phosphate
  modified_base 13: mod_base = OTHER; note = 2'-O-methyluridine-3'-phosphate
  modified_base 14: mod_base = OTHER; note = 2'-deoxy-2'-fluorocytidine-3'-phosphate
  modified_base 15: mod_base = OTHER; note = 2'-O-methylcytidine-3'-phosphate
  modified_base 16: mod_base = OTHER; note = 2'-deoxy-2'-fluorouridine-3'-phosphate
  modified_base 17: mod_base = OTHER; note = 2'-O-methyluridine-3'-phosphate
  modified_base 18: mod_base = OTHER; note = 2'-O-methylcytidine-3'-phosphate
  modified_base 19: mod_base = OTHER; note = 2'-O-methyluridine-3'-phosphate
  modified_base 20: mod_base = OTHER; note = 2'-O-methyluridine-3'-phosphate
  modified_base 21: mod_base = OTHER; note = 2'-O-methylcytidine-3'-phosphorothioate
  modified_base 22: mod_base = OTHER; note = 2'-O-methyluridine-3'-phosphorothioate
  modified_base 23: mod_base = OTHER; note = 2'-O-methylguanosine
tagagaaatgtctccttcttctg

SEQ ID NO: 1383 - RNA, 23 nt, synthetic construct
  source 1..23: mol_type = other RNA
  modified_base 1: mod_base = OTHER; note = 2'-O-methyluridine-3'-phosphorothioate 5'-(E)-Vinylphosphonate
  modified_base 2: mod_base = OTHER; note = 2'-deoxy-2'-fluorouridine-3'-phosphorothioate
  modified_base 3: mod_base = OTHER; note = 2'-O-methyluridine-3'-phosphate
  modified_base 4: mod_base = OTHER; note = 2'-O-methyluridine-3'-phosphate
  modified_base 5: mod_base = OTHER; note = 2'-O-methylcytidine-3'-phosphate
  modified_base 6: mod_base = OTHER; note = 2'-deoxy-2'-fluoroguanosine-3'-phosphate
  modified_base 7: mod_base = OTHER; note = 2'-O-methylguanosine-3'-phosphate
  modified_base 8: mod_base = OTHER; note = 2'-deoxy-2'-fluoroadenosine-3'-phosphate
  modified_base 9: mod_base = OTHER; note = 2'-deoxy-2'-fluoroguanosine-3'-phosphate
  modified_base 10: mod_base = OTHER; note = 2'-O-methyladenosine-3'-phosphate
  modified_base 11: mod_base = OTHER; note = 2'-O-methylguanosine-3'-phosphate
  modified_base 12: mod_base = OTHER; note = 2'-O-methyladenosine-3'-phosphate
  modified_base 13: mod_base = OTHER; note = 2'-O-methyladenosine-3'-phosphate
  modified_base 14: mod_base = OTHER; note = 2'-deoxy-2'-fluoroadenosine-3'-phosphate
  modified_base 15: mod_base = OTHER; note = 2'-O-methyluridine-3'-phosphate
  modified_base 16: mod_base = OTHER; note = 2'-deoxy-2'-fluoroguanosine-3'-phosphate
  modified_base 17: mod_base = OTHER; note = 2'-O-methyluridine-3'-phosphate
  modified_base 18: mod_base = OTHER; note = 2'-O-methylcytidine-3'-phosphate
  modified_base 19: mod_base = OTHER; note = 2'-O-methyluridine-3'-phosphate
  modified_base 20: mod_base = OTHER; note = 2'-O-methylcytidine-3'-phosphate
  modified_base 21: mod_base = OTHER; note = 2'-O-methylcytidine-3'-phosphorothioate
  modified_base 22: mod_base = OTHER; note = 2'-O-methyluridine-3'-phosphorothioate
  modified_base 23: mod_base = OTHER; note = 2'-O-methyluridine
ttttcggagagaaatgtctcctt

SEQ ID NO: 1384 - RNA, 23 nt, synthetic construct
  source 1..23: mol_type = other RNA
  modified_base 1: mod_base = OTHER; note = 2'-O-methyluridine-3'-phosphorothioate 5'-(E)-Vinylphosphonate
  modified_base 2: mod_base = OTHER; note = 2'-deoxy-2'-fluoroadenosine-3'-phosphorothioate
  modified_base 3: mod_base = OTHER; note = 2'-O-methylguanosine-3'-phosphate
  modified_base 4: mod_base = OTHER; note = 2'-O-methyluridine-3'-phosphate
  modified_base 5: mod_base = OTHER; note = 2'-O-methyluridine-3'-phosphate
  modified_base 6: mod_base = OTHER; note = 2'-deoxy-2'-fluorocytidine-3'-phosphate
  modified_base 7: mod_base = OTHER; note = 2'-O-methyladenosine-3'-phosphate
  modified_base 8: mod_base = OTHER; note = 2'-deoxy-2'-fluorouridine-3'-phosphate
  modified_base 9: mod_base = OTHER; note = 2'-deoxy-2'-fluorouridine-3'-phosphate
  modified_base 10: mod_base = OTHER; note = 2'-O-methyluridine-3'-phosphate
  modified_base 11: mod_base = OTHER; note = 2'-O-methyluridine-3'-phosphate
  modified_base 12: mod_base = OTHER; note = 2'-O-methylcytidine-3'-phosphate
  modified_base 13: mod_base = OTHER; note = 2'-O-methylguanosine-3'-phosphate
  modified_base 14: mod_base = OTHER; note = 2'-deoxy-2'-fluoroguanosine-3'-phosphate
  modified_base 15: mod_base = OTHER; note = 2'-O-methyladenosine-3'-phosphate
  modified_base 16: mod_base = OTHER; note = 2'-deoxy-2'-fluoroguanosine-3'-phosphate
  modified_base 17: mod_base = OTHER; note = 2'-O-methyladenosine-3'-phosphate
  modified_base 18: mod_base = OTHER; note = 2'-O-methylguanosine-3'-phosphate
  modified_base 19: mod_base = OTHER; note = 2'-O-methyladenosine-3'-phosphate
  modified_base 20: mod_base = OTHER; note = 2'-O-methyladenosine-3'-phosphate
  modified_base 21: mod_base = OTHER; note = 2'-O-methyladenosine-3'-phosphorothioate
  modified_base 22: mod_base = OTHER; note = 2'-O-methyluridine-3'-phosphorothioate
  modified_base 23: mod_base = OTHER; note = 2'-O-methylguanosine
tagttcattttcggagagaaatg

SEQ ID NO: 1385 - RNA, 23 nt, synthetic construct
  source 1..23: mol_type = other RNA
  modified_base 1: mod_base = OTHER; note = 2'-O-methyluridine-3'-phosphorothioate 5'-(E)-Vinylphosphonate
  modified_base 2: mod_base = OTHER; note = 2'-deoxy-2'-fluorouridine-3'-phosphorothioate
  modified_base 3: mod_base = OTHER; note = 2'-O-methylguanosine-3'-phosphate
  modified_base 4: mod_base = OTHER; note = 2'-O-methyluridine-3'-phosphate
  modified_base 5: mod_base = OTHER; note = 2'-O-methyluridine-3'-phosphate
  modified_base 6: mod_base = OTHER; note = 2'-deoxy-2'-fluoroguanosine-3'-phosphate
  modified_base 7: mod_base = OTHER; note = 2'-O-methyladenosine-3'-phosphate
  modified_base 8: mod_base = OTHER; note = 2'-deoxy-2'-fluoroguanosine-3'-phosphate
  modified_base 9: mod_base = OTHER; note = 2'-deoxy-2'-fluorouridine-3'-phosphate
  modified_base 10: mod_base = OTHER; note = 2'-O-methyluridine-3'-phosphate
  modified_base 11: mod_base = OTHER; note = 2'-O-methylcytidine-3'-phosphate
  modified_base 12: mod_base = OTHER; note = 2'-O-methyladenosine-3'-phosphate
  modified_base 13: mod_base = OTHER; note = 2'-O-methyluridine-3'-phosphate
  modified_base 14: mod_base = OTHER; note = 2'-deoxy-2'-fluorouridine-3'-phosphate
  modified_base 15: mod_base = OTHER; note = 2'-O-methyluridine-3'-phosphate
  modified_base 16: mod_base = OTHER; note = 2'-deoxy-2'-fluorouridine-3'-phosphate
  modified_base 17: mod_base = OTHER; note = 2'-O-methylcytidine-3'-phosphate
  modified_base 18: mod_base = OTHER; note = 2'-O-methylguanosine-3'-phosphate
  modified_base 19: mod_base = OTHER; note = 2'-O-methylguanosine-3'-phosphate
  modified_base 20: mod_base = OTHER; note = 2'-O-methyladenosine-3'-phosphate
  modified_base 21: mod_base = OTHER; note = 2'-O-methylguanosine-3'-phosphorothioate
  modified_base 22: mod_base = OTHER; note = 2'-O-methyladenosine-3'-phosphorothioate
  modified_base 23: mod_base = OTHER; note = 2'-O-methylguanosine
ttgttgagttcattttcggagag

SEQ ID NO: 1386 - RNA, 23 nt, synthetic construct
  source 1..23: mol_type = other RNA
  modified_base 1: mod_base = OTHER; note = 2'-O-methyluridine-3'-phosphorothioate 5'-(E)-Vinylphosphonate
  modified_base 2: mod_base = OTHER; note = 2'-deoxy-2'-fluorouridine-3'-phosphorothioate
  modified_base 3: mod_base = OTHER; note = 2'-O-methylguanosine-3'-phosphate
  modified_base 4: mod_base = OTHER; note = 2'-O-methylguanosine-3'-phosphate
  modified_base 5: mod_base = OTHER; note = 2'-O-methylcytidine-3'-phosphate
  modified_base 6: mod_base = OTHER; note = 2'-deoxy-2'-fluorocytidine-3'-phosphate
  modified_base 7: mod_base = OTHER; note = 2'-O-methyluridine-3'-phosphate
  modified_base 8: mod_base = OTHER; note = 2'-deoxy-2'-fluoroguanosine-3'-phosphate
  modified_base 9: mod_base = OTHER; note = 2'-deoxy-2'-fluorouridine-3'-phosphate
  modified_base 10: mod_base = OTHER; note = 2'-O-methyluridine-3'-phosphate
  modified_base 11: mod_base = OTHER; note = 2'-O-methylguanosine-3'-phosphate
  modified_base 12: mod_base = OTHER; note = 2'-O-methyladenosine-3'-phosphate
  modified_base 13: mod_base = OTHER; note = 2'-O-methylguanosine-3'-phosphate
  modified_base 14: mod_base = OTHER; note = 2'-deoxy-2'-fluorouridine-3'-phosphate
  modified_base 15: mod_base = OTHER; note = 2'-O-methyluridine-3'-phosphate
  modified_base 16: mod_base = OTHER; note = 2'-deoxy-2'-fluorocytidine-3'-phosphate
  modified_base 17: mod_base = OTHER; note = 2'-O-methyladenosine-3'-phosphate
  modified_base 18: mod_base = OTHER; note = 2'-O-methyluridine-3'-phosphate
  modified_base 19: mod_base = OTHER; note = 2'-O-methyluridine-3'-phosphate
  modified_base 20: mod_base = OTHER; note = 2'-O-methyluridine-3'-phosphate
  modified_base 21: mod_base = OTHER; note = 2'-O-methyluridine-3'-phosphorothioate
  modified_base 22: mod_base = OTHER; note = 2'-O-methylcytidine-3'-phosphorothioate
  modified_base 23: mod_base = OTHER; note = 2'-O-methylguanosine
ttggcctgttgagttcattttcg

SEQ ID NO: 1387 - RNA, 23 nt, synthetic construct
  source 1..23: mol_type = other RNA
  modified_base 1: mod_base = OTHER; note = 2'-O-methyluridine-3'-phosphorothioate 5'-(E)-Vinylphosphonate
  modified_base 2: mod_base = OTHER; note = 2'-deoxy-2'-fluoroguanosine-3'-phosphorothioate
  modified_base 3: mod_base = OTHER; note = 2'-O-methyladenosine-3'-phosphate
  modified_base 4: mod_base = OTHER; note = 2'-O-methyladenosine-3'-phosphate
  modified_base 5: mod_base = OTHER; note = 2'-O-methylguanosine-3'-phosphate
  modified_base 6: mod_base = OTHER; note = 2'-deoxy-2'-fluoroguanosine-3'-phosphate
  modified_base 7: mod_base = OTHER; note = 2'-O-methyluridine-3'-phosphate
  modified_base 8: mod_base = OTHER; note = 2'-deoxy-2'-fluoroguanosine-3'-phosphate
  modified_base 9: mod_base = OTHER; note = 2'-deoxy-2'-fluoroguanosine-3'-phosphate
  modified_base 10: mod_base = OTHER; note = 2'-O-methylcytidine-3'-phosphate
  modified_base 11: mod_base = OTHER; note = 2'-O-methylcytidine-3'-phosphate
  modified_base 12: mod_base = OTHER; note = 2'-O-methyluridine-3'-phosphate
  modified_base 13: mod_base = OTHER; note = 2'-O-methylguanosine-3'-phosphate
  modified_base 14: mod_base = OTHER; note = 2'-deoxy-2'-fluorouridine-3'-phosphate
  modified_base 15: mod_base = OTHER; note = 2'-O-methyluridine-3'-phosphate
  modified_base 16: mod_base = OTHER; note = 2'-deoxy-2'-fluoroguanosine-3'-phosphate
  modified_base 17: mod_base = OTHER; note = 2'-O-methyladenosine-3'-phosphate
  modified_base 18: mod_base = OTHER; note = 2'-O-methylguanosine-3'-phosphate
  modified_base 19: mod_base = OTHER; note = 2'-O-methyluridine-3'-phosphate
  modified_base 20: mod_base = OTHER; note = 2'-O-methyluridine-3'-phosphate
  modified_base 21: mod_base = OTHER; note = 2'-O-methylcytidine-3'-phosphorothioate
  modified_base 22: mod_base = OTHER; note = 2'-O-methyladenosine-3'-phosphorothioate
  modified_base 23: mod_base = OTHER; note = 2'-O-methyluridine
tgaaggtggcctgttgagttcat

SEQ ID NO: 1388 - RNA, 23 nt, synthetic construct
  source 1..23: mol_type = other RNA
  modified_base 1: mod_base = OTHER; note = 2'-O-methyluridine-3'-phosphorothioate 5'-(E)-Vinylphosphonate
  modified_base 2: mod_base = OTHER; note = 2'-deoxy-2'-fluoroguanosine-3'-phosphorothioate
  modified_base 3: mod_base = OTHER; note = 2'-O-methylcytidine-3'-phosphate
  modified_base 4: mod_base = OTHER; note = 2'-O-methyladenosine-3'-phosphate
  modified_base 5: mod_base = OTHER; note = 2'-O-methyluridine-3'-phosphate
  modified_base 6: mod_base = OTHER; note = 2'-deoxy-2'-fluorocytidine-3'-phosphate
  modified_base 7: mod_base = OTHER; note = 2'-O-methylcytidine-3'-phosphate
  modified_base 8: mod_base = OTHER; note = 2'-deoxy-2'-fluorouridine-3'-phosphate
  modified_base 9: mod_base = OTHER; note = 2'-deoxy-2'-fluoroguanosine-3'-phosphate
  modified_base 10: mod_base = OTHER; note = 2'-O-methyladenosine-3'-phosphate
  modified_base 11: mod_base = OTHER; note = 2'-O-methyladenosine-3'-phosphate
  modified_base 12: mod_base = OTHER; note = 2'-O-methylguanosine-3'-phosphate
  modified_base 13: mod_base = OTHER; note = 2'-O-methylguanosine-3'-phosphate
  modified_base 14: mod_base = OTHER; note = 2'-deoxy-2'-fluorouridine-3'-phosphate
  modified_base 15: mod_base = OTHER; note = 2'-O-methylguanosine-3'-phosphate
  modified_base 16: mod_base = OTHER; note = 2'-deoxy-2'-fluoroguanosine-3'-phosphate
  modified_base 17: mod_base = OTHER; note = 2'-O-methylcytidine-3'-phosphate
  modified_base 18: mod_base = OTHER; note = 2'-O-methylcytidine-3'-phosphate
  modified_base 19: mod_base = OTHER; note = 2'-O-methyluridine-3'-phosphate
  modified_base 20: mod_base = OTHER; note = 2'-O-methylguanosine-3'-phosphate
  modified_base 21: mod_base = OTHER; note = 2'-O-methyluridine-3'-phosphorothioate
  modified_base 22: mod_base = OTHER; note = 2'-O-methyluridine-3'-phosphorothioate
  modified_base 23: mod_base = OTHER; note = 2'-O-methylguanosine
tgcatcctgaaggtggcctgttg

SEQ ID NO: 1389 - RNA, 23 nt, synthetic construct
  source 1..23: mol_type = other RNA
  modified_base 1: mod_base = OTHER; note = 2'-O-methyluridine-3'-phosphorothioate 5'-(E)-Vinylphosphonate
  modified_base 2: mod_base = OTHER; note = 2'-deoxy-2'-fluoroadenosine-3'-phosphorothioate
  modified_base 3: mod_base = OTHER; note = 2'-O-methylguanosine-3'-phosphate
  modified_base 4: mod_base = OTHER; note = 2'-O-methylguanosine-3'-phosphate
  modified_base 5: mod_base = OTHER; note = 2'-O-methylcytidine-3'-phosphate
  modified_base 6: mod_base = OTHER; note = 2'-deoxy-2'-fluoroadenosine-3'-phosphate
  modified_base 7: mod_base = OTHER; note = 2'-O-methylcytidine-3'-phosphate
  modified_base 8: mod_base = OTHER; note = 2'-deoxy-2'-fluoroadenosine-3'-phosphate
  modified_base 9: mod_base = OTHER; note = 2'-deoxy-2'-fluorouridine-3'-phosphate
  modified_base 10: mod_base = OTHER; note = 2'-O-methylguanosine-3'-phosphate
  modified_base 11: mod_base = OTHER; note = 2'-O-methylguanosine-3'-phosphate
  modified_base 12: mod_base = OTHER; note = 2'-O-methyladenosine-3'-phosphate
  modified_base 13: mod_base = OTHER; note = 2'-O-methylguanosine-3'-phosphate
  modified_base 14: mod_base = OTHER; note = 2'-deoxy-2'-fluorocytidine-3'-phosphate
  modified_base 15: mod_base = OTHER; note = 2'-O-methylguanosine-3'-phosphate
  modified_base 16: mod_base = OTHER; note = 2'-deoxy-2'-fluoroadenosine-3'-phosphate
  modified_base 17: mod_base = OTHER; note = 2'-O-methylguanosine-3'-phosphate
  modified_base 18: mod_base = OTHER; note = 2'-O-methylguanosine-3'-phosphate
  modified_base 19: mod_base = OTHER; note = 2'-O-methyluridine-3'-phosphate
  modified_base 20: mod_base = OTHER; note = 2'-O-methylguanosine-3'-phosphate
  modified_base 21: mod_base = OTHER; note = 2'-O-methylguanosine-3'-phosphorothioate
  modified_base 22: mod_base = OTHER; note = 2'-O-methylcytidine-3'-phosphorothioate
  modified_base 23: mod_base = OTHER; note = 2'-O-methyladenosine
taggcacatggagcgaggtggca

SEQ ID NO: 1390 - RNA, 23 nt, synthetic construct
  source 1..23: mol_type = other RNA
  modified_base 1: mod_base = OTHER; note = 2'-O-methyluridine-3'-phosphorothioate 5'-(E)-Vinylphosphonate
  modified_base 2: mod_base = OTHER; note = 2'-deoxy-2'-fluoroguanosine-3'-phosphorothioate
  modified_base 3: mod_base = OTHER; note = 2'-O-methyladenosine-3'-phosphate
  modified_base 4: mod_base = OTHER; note = 2'-O-methylguanosine-3'-phosphate
  modified_base 5: mod_base = OTHER; note = 2'-O-methyluridine-3'-phosphate
  modified_base 6: mod_base = OTHER; note = 2'-deoxy-2'-fluoroguanosine-3'-phosphate
  modified_base 7: mod_base = OTHER; note = 2'-O-methyladenosine-3'-phosphate
  modified_base 8: mod_base = OTHER; note = 2'-deoxy-2'-fluoroguanosine-3'-phosphate
  modified_base 9: mod_base = OTHER; note = 2'-deoxy-2'-fluoroguanosine-3'-phosphate
  modified_base 10: mod_base = OTHER; note = 2'-O-methylcytidine-3'-phosphate
  modified_base 11: mod_base = OTHER; note = 2'-O-methyladenosine-3'-phosphate
  modified_base 12: mod_base = OTHER; note = 2'-O-methylcytidine-3'-phosphate
  modified_base 13: mod_base = OTHER; note = 2'-O-methyladenosine-3'-phosphate
  modified_base 14: mod_base = OTHER; note = 2'-deoxy-2'-fluorouridine-3'-phosphate
  modified_base 15: mod_base = OTHER; note = 2'-O-methylguanosine-3'-phosphate
  modified_base 16: mod_base = OTHER; note = 2'-deoxy-2'-fluoroguanosine-3'-phosphate
  modified_base 17: mod_base = OTHER; note = 2'-O-methyladenosine-3'-phosphate
  modified_base 18: mod_base = OTHER; note = 2'-O-methylguanosine-3'-phosphate
  modified_base 19: mod_base = OTHER; note = 2'-O-methylcytidine-3'-phosphate
  modified_base 20: mod_base = OTHER; note = 2'-O-methylguanosine-3'-phosphate
  modified_base 21: mod_base = OTHER; note = 2'-O-methyladenosine-3'-phosphorothioate
  modified_base 22: mod_base = OTHER; note = 2'-O-methylguanosine-3'-phosphorothioate
  modified_base 23: mod_base = OTHER; note = 2'-O-methylguanosine
tgagtgaggcacatggagcgagg

SEQ ID NO: 1391 - RNA, 23 nt, synthetic construct
  source 1..23: mol_type = other RNA
  modified_base 1: mod_base = OTHER; note = 2'-O-methyluridine-3'-phosphorothioate 5'-(E)-Vinylphosphonate
  modified_base 2: mod_base = OTHER; note = 2'-deoxy-2'-fluorouridine-3'-phosphorothioate
  modified_base 3: mod_base = OTHER; note = 2'-O-methyluridine-3'-phosphate
  modified_base 4: mod_base = OTHER; note = 2'-O-methylcytidine-3'-phosphate
  modified_base 5: mod_base = OTHER; note = 2'-O-methylcytidine-3'-phosphate
  modified_base 6: mod_base = OTHER; note = 2'-deoxy-2'-fluorouridine-3'-phosphate
  modified_base 7: mod_base = OTHER; note = 2'-O-methylguanosine-3'-phosphate
  modified_base 8: mod_base = OTHER; note = 2'-deoxy-2'-fluorouridine-3'-phosphate
  modified_base 9: mod_base = OTHER; note = 2'-deoxy-2'-fluoroguanosine-3'-phosphate
  modified_base 10: mod_base = OTHER; note = 2'-O-methyladenosine-3'-phosphate
  modified_base 11: mod_base = OTHER; note = 2'-O-methylguanosine-3'-phosphate
  modified_base 12: mod_base = OTHER; note = 2'-O-methyluridine-3'-phosphate
  modified_base 13: mod_base = OTHER; note = 2'-O-methylguanosine-3'-phosphate
  modified_base 14: mod_base = OTHER; note = 2'-deoxy-2'-fluoroadenosine-3'-phosphate
  modified_base 15: mod_base = OTHER; note = 2'-O-methylguanosine-3'-phosphate
  modified_base 16: mod_base = OTHER; note = 2'-deoxy-2'-fluoroguanosine-3'-phosphate
  modified_base 17: mod_base = OTHER; note = 2'-O-methylcytidine-3'-phosphate
  modified_base 18: mod_base = OTHER; note = 2'-O-methyladenosine-3'-phosphate
  modified_base 19: mod_base = OTHER; note = 2'-O-methylcytidine-3'-phosphate
  modified_base 20: mod_base = OTHER; note = 2'-O-methyladenosine-3'-phosphate
  modified_base 21: mod_base = OTHER; note = 2'-O-methyluridine-3'-phosphorothioate
  modified_base 22: mod_base = OTHER; note = 2'-O-methylguanosine-3'-phosphorothioate
  modified_base 23: mod_base = OTHER; note = 2'-O-methylguanosine
tttcctgtgagtgaggcacatgg

SEQ ID NO: 1392 - RNA, 23 nt, synthetic construct
  source 1..23: mol_type = other RNA
  modified_base 1: mod_base = OTHER; note = 2'-O-methyluridine-3'-phosphorothioate 5'-(E)-Vinylphosphonate
  modified_base 2: mod_base = OTHER; note = 2'-deoxy-2'-fluorouridine-3'-phosphorothioate
  modified_base 3: mod_base = OTHER; note = 2'-O-methyluridine-3'-phosphate
  modified_base 4: mod_base = OTHER; note = 2'-O-methyluridine-3'-phosphate
  modified_base 5: mod_base = OTHER; note = 2'-O-methylcytidine-3'-phosphate
  modified_base 6: mod_base = OTHER; note = 2'-deoxy-2'-fluorocytidine-3'-phosphate
  modified_base 7: mod_base = OTHER; note = 2'-O-methyluridine-3'-phosphate
  modified_base 8: mod_base = OTHER; note = 2'-deoxy-2'-fluorouridine-3'-phosphate
  modified_base 9: mod_base = OTHER; note = 2'-deoxy-2'-fluorocytidine-3'-phosphate
  modified_base 10: mod_base = OTHER; note = 2'-O-methylcytidine-3'-phosphate
  modified_base 11: mod_base = OTHER; note = 2'-O-methyluridine-3'-phosphate
  modified_base 12: mod_base = OTHER; note = 2'-O-methylguanosine-3'-phosphate
  modified_base 13: mod_base = OTHER; note = 2'-O-methyluridine-3'-phosphate
  modified_base 14: mod_base = OTHER; note = 2'-deoxy-2'-fluoroguanosine-3'-phosphate
  modified_base 15: mod_base = OTHER; note = 2'-O-methyladenosine-3'-phosphate
  modified_base 16: mod_base = OTHER; note = 2'-deoxy-2'-fluoroguanosine-3'-phosphate
  modified_base 17: mod_base = OTHER; note = 2'-O-methyluridine-3'-phosphate
  modified_base 18: mod_base = OTHER; note = 2'-O-methylguanosine-3'-phosphate
  modified_base 19: mod_base = OTHER; note = 2'-O-methyladenosine-3'-phosphate
  modified_base 20: mod_base = OTHER; note = 2'-O-methylguanosine-3'-phosphate
  modified_base 21: mod_base = OTHER; note = 2'-O-methylguanosine-3'-phosphorothioate
  modified_base 22: mod_base = OTHER; note = 2'-O-methylcytidine-3'-phosphorothioate
  modified_base 23: mod_base = OTHER; note = 2'-O-methyladenosine
ttttccttcctgtgagtgaggca

SEQ ID NO: 1393 - RNA, 23 nt, synthetic construct
  source 1..23: mol_type = other RNA
  modified_base 1: mod_base = OTHER; note = 2'-O-methyluridine-3'-phosphorothioate 5'-(E)-Vinylphosphonate
  modified_base 2: mod_base = OTHER; note = 2'-deoxy-2'-fluoroadenosine-3'-phosphorothioate
  modified_base 3: mod_base = OTHER; note = 2'-O-methylguanosine-3'-phosphate
  modified_base 4: mod_base = OTHER; note = 2'-O-methylguanosine-3'-phosphate
  modified_base 5: mod_base = OTHER; note = 2'-O-methyluridine-3'-phosphate
  modified_base 6: mod_base = OTHER; note = 2'-deoxy-2'-fluoroguanosine-3'-phosphate
  modified_base 7: mod_base = OTHER; note = 2'-O-methylcytidine-3'-phosphate
  modified_base 8: mod_base = OTHER; note = 2'-deoxy-2'-fluorouridine-3'-phosphate
  modified_base 9: mod_base = OTHER; note = 2'-deoxy-2'-fluoroguanosine-3'-phosphate
  modified_base 10: mod_base = OTHER; note = 2'-O-methyluridine-3'-phosphate
  modified_base 11: mod_base = OTHER; note = 2'-O-methyluridine-3'-phosphate
  modified_base 12: mod_base = OTHER; note = 2'-O-methyluridine-3'-phosphate
  modified_base 13: mod_base = OTHER; note = 2'-O-methylcytidine-3'-phosphate
  modified_base 14: mod_base = OTHER; note = 2'-deoxy-2'-fluorocytidine-3'-phosphate
  modified_base 15: mod_base = OTHER; note = 2'-O-methyluridine-3'-phosphate
  modified_base 16: mod_base = OTHER; note = 2'-deoxy-2'-fluorouridine-3'-phosphate
  modified_base 17: mod_base = OTHER; note = 2'-O-methylcytidine-3'-phosphate
  modified_base 18: mod_base = OTHER; note = 2'-O-methylcytidine-3'-phosphate
  modified_base 19: mod_base = OTHER; note = 2'-O-methyluridine-3'-phosphate
  modified_base 20: mod_base = OTHER; note = 2'-O-methylguanosine-3'-phosphate
  modified_base 21: mod_base = OTHER; note = 2'-O-methyluridine-3'-phosphorothioate
  modified_base 22: mod_base = OTHER; note = 2'-O-methylguanosine-3'-phosphorothioate
  modified_base 23: mod_base = OTHER; note = 2'-O-methyladenosine
taggtgctgtttccttcctgtga

SEQ ID NO: 1394 - RNA, 23 nt, synthetic construct
  source 1..23: mol_type = other RNA
  modified_base 1: mod_base = OTHER; note = 2'-O-methyluridine-3'-phosphorothioate 5'-(E)-Vinylphosphonate
  modified_base 2: mod_base = OTHER; note = 2'-deoxy-2'-fluoroguanosine-3'-phosphorothioate
  modified_base 3: mod_base = OTHER; note = 2'-O-methyladenosine-3'-phosphate
  modified_base 4: mod_base = OTHER; note = 2'-O-methylguanosine-3'-phosphate
  modified_base 5: mod_base = OTHER; note = 2'-O-methyladenosine-3'-phosphate
  modified_base 6: mod_base = OTHER; note = 2'-deoxy-2'-fluoroguanosine-3'-phosphate
  modified_base 7: mod_base = OTHER; note = 2'-O-methyladenosine-3'-phosphate
  modified_base 8: mod_base = OTHER; note = 2'-deoxy-2'-fluoroguanosine-3'-phosphate
  modified_base 9: mod_base = OTHER; note = 2'-deoxy-2'-fluoroguanosine-3'-phosphate
  modified_base 10: mod_base = OTHER; note = 2'-O-methyluridine-3'-phosphate
  modified_base 11: mod_base = OTHER; note = 2'-O-methylguanosine-3'-phosphate
  modified_base 12: mod_base = OTHER; note = 2'-O-methylcytidine-3'-phosphate
  modified_base 13: mod_base = OTHER; note = 2'-O-methyluridine-3'-phosphate
  modified_base 14: mod_base = OTHER; note = 2'-deoxy-2'-fluoroguanosine-3'-phosphate
  modified_base 15: mod_base = OTHER; note = 2'-O-methyluridine-3'-phosphate
  modified_base 16: mod_base = OTHER; note = 2'-deoxy-2'-fluorouridine-3'-phosphate
  modified_base 17: mod_base = OTHER; note = 2'-O-methyluridine-3'-phosphate
  modified_base 18: mod_base = OTHER; note = 2'-O-methylcytidine-3'-phosphate
  modified_base 19: mod_base = OTHER; note = 2'-O-methylcytidine-3'-phosphate
  modified_base 20: mod_base = OTHER; note = 2'-O-methyluridine-3'-phosphate
  modified_base 21: mod_base = OTHER; note = 2'-O-methyluridine-3'-phosphorothioate
  modified_base 22: mod_base = OTHER; note = 2'-O-methylcytidine-3'-phosphorothioate
  modified_base 23: mod_base = OTHER; note = 2'-O-methylcytidine
tgagagaggtgctgtttccttcc

SEQ ID NO: 1395 - RNA, 23 nt, synthetic construct
  source 1..23: mol_type = other RNA
  modified_base 1: mod_base = OTHER; note = 2'-O-methyluridine-3'-phosphorothioate 5'-(E)-Vinylphosphonate
  modified_base 2: mod_base = OTHER; note = 2'-deoxy-2'-fluorocytidine-3'-phosphorothioate
  modified_base 3: mod_base = OTHER; note = 2'-O-methyluridine-3'-phosphate
  modified_base 4: mod_base = OTHER; note = 2'-O-methylguanosine-3'-phosphate
  modified_base 5: mod_base = OTHER; note = 2'-O-methyladenosine-3'-phosphate
  modified_base 6: mod_base = OTHER; note = 2'-deoxy-2'-fluoroadenosine-3'-phosphate
  modified_base 7: mod_base = OTHER; note = 2'-O-methylguanosine-3'-phosphate
  modified_base 8: mod_base = OTHER; note = 2'-deoxy-2'-fluoroadenosine-3'-phosphate
  modified_base 9: mod_base = OTHER; note = 2'-deoxy-2'-fluorocytidine-3'-phosphate
  modified_base 10: mod_base = OTHER; note = 2'-O-methylcytidine-3'-phosphate
  modified_base 11: mod_base = OTHER; note = 2'-O-methylcytidine-3'-phosphate
  modified_base 12: mod_base = OTHER; note = 2'-O-methyluridine-3'-phosphate
  modified_base 13: mod_base = OTHER; note = 2'-O-methylcytidine-3'-phosphate
  modified_base 14: mod_base = OTHER; note = 2'-deoxy-2'-fluorocytidine-3'-phosphate
  modified_base 15: mod_base = OTHER; note = 2'-O-methyluridine-3'-phosphate
  modified_base 16: mod_base = OTHER; note = 2'-deoxy-2'-fluoroguanosine-3'-phosphate
  modified_base 17: mod_base = OTHER; note = 2'-O-methylguanosine-3'-phosphate
  modified_base 18: mod_base = OTHER; note = 2'-O-methyladenosine-3'-phosphate
  modified_base 19: mod_base = OTHER; note = 2'-O-methylguanosine-3'-phosphate
  modified_base 20: mod_base = OTHER; note = 2'-O-methyladenosine-3'-phosphate
  modified_base 21: mod_base = OTHER; note = 2'-O-methylguanosine-3'-phosphorothioate
  modified_base 22: mod_base = OTHER; note = 2'-O-methyladenosine-3'-phosphorothioate
  modified_base 23: mod_base = OTHER; note = 2'-O-methylguanosine
tctgaagaccctcctggagagag

SEQ ID NO: 1396 - RNA, 23 nt, synthetic construct
  source 1..23: mol_type = other RNA
  modified_base 1: mod_base = OTHER; note = 2'-O-methyluridine-3'-phosphorothioate 5'-(E)-Vinylphosphonate
  modified_base 2: mod_base = OTHER; note = 2'-deoxy-2'-fluoroadenosine-3'-phosphorothioate
  modified_base 3: mod_base = OTHER; note = 2'-O-methylguanosine-3'-phosphate
  modified_base 4: mod_base = OTHER; note = 2'-O-methyladenosine-3'-phosphate
  modified_base 5: mod_base = OTHER; note = 2'-O-methyluridine-3'-phosphate
  modified_base 6: mod_base = OTHER; note = 2'-deoxy-2'-fluorocytidine-3'-phosphate
  modified_base 7: mod_base = OTHER; note = 2'-O-methylcytidine-3'-phosphate
  modified_base 8: mod_base = OTHER; note = 2'-deoxy-2'-fluorouridine-3'-phosphate
  modified_base 9: mod_base = OTHER; note = 2'-deoxy-2'-fluoroguanosine-3'-phosphate
  modified_base 10: mod_base = OTHER; note = 2'-O-methyladenosine-3'-phosphate
  modified_base 11: mod_base = OTHER; note = 2'-O-methyladenosine-3'-phosphate
  modified_base 12: mod_base = OTHER; note = 2'-O-methylguanosine-3'-phosphate
  modified_base 13: mod_base = OTHER; note = 2'-O-methyladenosine-3'-phosphate
  modified_base 14: mod_base = OTHER; note = 2'-deoxy-2'-fluorocytidine-3'-phosphate
  modified_base 15: mod_base = OTHER; note = 2'-O-methylcytidine-3'-phosphate
  modified_base 16: mod_base = OTHER; note = 2'-deoxy-2'-fluorocytidine-3'-phosphate
  modified_base 17: mod_base = OTHER; note = 2'-O-methyluridine-3'-phosphate
  modified_base 18: mod_base = OTHER; note = 2'-O-methylcytidine-3'-phosphate
  modified_base 19: mod_base = OTHER; note = 2'-O-methylcytidine-3'-phosphate
  modified_base 20: mod_base = OTHER; note = 2'-O-methyluridine-3'-phosphate
  modified_base 21: mod_base = OTHER; note = 2'-O-methylguanosine-3'-phosphorothioate
  modified_base 22: mod_base = OTHER; note = 2'-O-methylguanosine-3'-phosphorothioate
  modified_base 23: mod_base = OTHER; note = 2'-O-methyladenosine
tagatcctgaagaccctcctgga

SEQ ID NO: 1397 - RNA, 23 nt, synthetic construct
  source 1..23: mol_type = other RNA
  modified_base 1: mod_base = OTHER; note = 2'-O-methyluridine-3'-phosphorothioate 5'-(E)-Vinylphosphonate
  modified_base 2: mod_base = OTHER; note = 2'-deoxy-2'-fluorouridine-3'-phosphorothioate
  modified_base 3: mod_base = OTHER; note = 2'-O-methylguanosine-3'-phosphate
  modified_base 4: mod_base = OTHER; note = 2'-O-methylguanosine-3'-phosphate
  modified_base 5: mod_base = OTHER; note = 2'-O-methyladenosine-3'-phosphate
  modified_base 6: mod_base = OTHER; note = 2'-deoxy-2'-fluorouridine-3'-phosphate
  modified_base 7: mod_base = OTHER; note = 2'-O-methylguanosine-3'-phosphate
  modified_base 8: mod_base = OTHER; note = 2'-deoxy-2'-fluoroadenosine-3'-phosphate
  modified_base 9: mod_base = OTHER; note = 2'-deoxy-2'-fluoroguanosine-3'-phosphate
  modified_base 10: mod_base = OTHER; note = 2'-O-methyladenosine-3'-phosphate
  modified_base 11: mod_base = OTHER; note = 2'-O-methyluridine-3'-phosphate
  modified_base 12: mod_base = OTHER; note = 2'-O-methylcytidine-3'-phosphate
  modified_base 13: mod_base = OTHER; note = 2'-O-methylcytidine-3'-phosphate
  modified_base 14: mod_base = OTHER; note = 2'-deoxy-2'-fluorouridine-3'-phosphate
  modified_base 15: mod_base = OTHER; note = 2'-O-methylguanosine-3'-phosphate
  modified_base 16: mod_base = OTHER; note = 2'-deoxy-2'-fluoroadenosine-3'-phosphate
  modified_base 17: mod_base = OTHER; note = 2'-O-methyladenosine-3'-phosphate
  modified_base 18: mod_base = OTHER; note = 2'-O-methylguanosine-3'-phosphate
  modified_base 19: mod_base = OTHER; note = 2'-O-methyladenosine-3'-phosphate
  modified_base 20: mod_base = OTHER; note = 2'-O-methylcytidine-3'-phosphate
  modified_base 21: mod_base = OTHER; note = 2'-O-methylcytidine-3'-phosphorothioate
  modified_base 22: mod_base = OTHER; note = 2'-O-methylcytidine-3'-phosphorothioate
  modified_base 23: mod_base = OTHER; note = 2'-O-methyluridine
ttggatgagatcctgaagaccct

SEQ ID NO: 1398 - RNA, 23 nt, synthetic construct
  source 1..23: mol_type = other RNA
  modified_base 1: mod_base = OTHER; note = 2'-O-methyluridine-3'-phosphorothioate 5'-(E)-Vinylphosphonate
  modified_base 2: mod_base = OTHER; note = 2'-deoxy-2'-fluorocytidine-3'-phosphorothioate
  modified_base 3: mod_base = OTHER; note = 2'-O-methyluridine-3'-phosphate
  modified_base 4: mod_base = OTHER; note = 2'-O-methylguanosine-3'-phosphate
  modified_base 5: mod_base = OTHER; note = 2'-O-methyluridine-3'-phosphate
  modified_base 6: mod_base = OTHER; note = 2'-deoxy-2'-fluoroguanosine-3'-phosphate
  modified_base 7: mod_base = OTHER; note = 2'-O-methyluridine-3'-phosphate
  modified_base 8: mod_base = OTHER; note = 2'-deoxy-2'-fluoroguanosine-3'-phosphate
  modified_base 9: mod_base = OTHER; note = 2'-deoxy-2'-fluoroguanosine-3'-phosphate
  modified_base 10: mod_base = OTHER; note = 2'-O-methyladenosine-3'-phosphate
  modified_base 11: mod_base = OTHER; note = 2'-O-methyluridine-3'-phosphate
  modified_base 12: mod_base = OTHER; note = 2'-O-methylguanosine-3'-phosphate
  modified_base 13: mod_base = OTHER; note = 2'-O-methyladenosine-3'-phosphate
  modified_base 14: mod_base = OTHER; note = 2'-deoxy-2'-fluoroguanosine-3'-phosphate
  modified_base 15: mod_base = OTHER; note = 2'-O-methyladenosine-3'-phosphate
  modified_base 16: mod_base = OTHER; note = 2'-deoxy-2'-fluorouridine-3'-phosphate
  modified_base 17: mod_base = OTHER; note = 2'-O-methylcytidine-3'-phosphate
  modified_base 18: mod_base = OTHER; note = 2'-O-methylcytidine-3'-phosphate
  modified_base 19: mod_base = OTHER; note = 2'-O-methyluridine-3'-phosphate
  modified_base 20: mod_base = OTHER; note = 2'-O-methylguanosine-3'-phosphate
  modified_base 21: mod_base = OTHER; note = 2'-O-methyladenosine-3'-phosphorothioate
  modified_base 22: mod_base = OTHER; note = 2'-O-methyladenosine-3'-phosphorothioate
  modified_base 23: mod_base = OTHER; note = 2'-O-methylguanosine
tctgtgtggatgagatcctgaag

SEQ ID NO: 1399 - RNA, 23 nt, synthetic construct
  source 1..23: mol_type = other RNA
  modified_base 1: mod_base = OTHER; note = 2'-O-methyluridine-3'-phosphorothioate 5'-(E)-Vinylphosphonate
  modified_base 2: mod_base = OTHER; note = 2'-deoxy-2'-fluorocytidine-3'-phosphorothioate
  modified_base 3: mod_base = OTHER; note = 2'-O-methyladenosine-3'-phosphate
  modified_base 4: mod_base = OTHER; note = 2'-O-methyladenosine-3'-phosphate
  modified_base 5: mod_base = OTHER; note = 2'-O-methylguanosine-3'-phosphate
  modified_base 6: mod_base = OTHER; note = 2'-deoxy-2'-fluoroguanosine-3'-phosphate
  modified_base 7: mod_base = OTHER; note = 2'-O-methyluridine-3'-phosphate
  modified_base 8: mod_base = OTHER; note = 2'-deoxy-2'-fluoroguanosine-3'-phosphate
  modified_base 9: mod_base = OTHER; note = 2'-deoxy-2'-fluoroguanosine-3'-phosphate
  modified_base 10: mod_base = OTHER; note = 2'-O-methylcytidine-3'-phosphate
  modified_base 11: mod_base = OTHER; note = 2'-O-methyluridine-3'-phosphate
  modified_base 12: mod_base = OTHER; note = 2'-O-methylguanosine-3'-phosphate
  modified_base 13: mod_base = OTHER; note = 2'-O-methyluridine-3'-phosphate
  modified_base 14: mod_base = OTHER; note = 2'-deoxy-2'-fluoroguanosine-3'-phosphate
  modified_base 15: mod_base = OTHER; note = 2'-O-methyluridine-3'-phosphate
  modified_base 16: mod_base = OTHER; note = 2'-deoxy-2'-fluoroguanosine-3'-phosphate
  modified_base 17: mod_base = OTHER; note = 2'-O-methylguanosine-3'-phosphate
  modified_base 18: mod_base = OTHER; note = 2'-O-methyladenosine-3'-phosphate
  modified_base 19: mod_base = OTHER; note = 2'-O-methyluridine-3'-phosphate
  modified_base 20: mod_base = OTHER; note = 2'-O-methylguanosine-3'-phosphate
  modified_base 21: mod_base = OTHER; note = 2'-O-methyladenosine-3'-phosphorothioate
  modified_base 22: mod_base = OTHER; note = 2'-O-methylguanosine-3'-phosphorothioate
  modified_base 23: mod_base = OTHER; note = 2'-O-methyladenosine
tcaaggtggctgtgtggatgaga

SEQ ID NO: 1400 - RNA, 23 nt, synthetic construct
  source 1..23: mol_type = other RNA
  modified_base 1: mod_base = OTHER; note = 2'-O-methyluridine-3'-phosphorothioate 5'-(E)-Vinylphosphonate
  modified_base 2: mod_base = OTHER; note = 2'-deoxy-2'-fluoroguanosine-3'-phosphorothioate
  modified_base 3: mod_base = OTHER; note = 2'-O-methyluridine-3'-phosphate
  modified_base 4: mod_base = OTHER; note = 2'-O-methylcytidine-3'-phosphate
  modified_base 5: mod_base = OTHER; note = 2'-O-methyladenosine-3'-phosphate
  modified_base 6: mod_base = OTHER; note = 2'-deoxy-2'-fluorocytidine-3'-phosphate
  modified_base 7: mod_base = OTHER; note = 2'-O-methylcytidine-3'-phosphate
  modified_base 8: mod_base = OTHER; note = 2'-deoxy-2'-fluoroadenosine-3'-phosphate
  modified_base 9: mod_base = OTHER; note = 2'-deoxy-2'-fluoroadenosine-3'-phosphate
  modified_base 10: mod_base = OTHER; note = 2'-O-methylguanosine-3'-phosphate
  modified_base 11: mod_base = OTHER; note = 2'-O-methylguanosine-3'-phosphate
  modified_base 12: mod_base = OTHER; note = 2'-O-methyluridine-3'-phosphate
  modified_base 13: mod_base = OTHER; note = 2'-O-methylguanosine-3'-phosphate
  modified_base 14: mod_base = OTHER; note = 2'-deoxy-2'-fluoroguanosine-3'-phosphate
  modified_base 15: mod_base = OTHER; note = 2'-O-methylcytidine-3'-phosphate
  modified_base 16: mod_base = OTHER; note = 2'-deoxy-2'-fluorouridine-3'-phosphate
  modified_base 17: mod_base = OTHER; note = 2'-O-methylguanosine-3'-phosphate
  modified_base 18: mod_base = OTHER; note = 2'-O-methyluridine-3'-phosphate
  modified_base 19: mod_base = OTHER; note = 2'-O-methylguanosine-3'-phosphate
  modified_base 20: mod_base = OTHER; note = 2'-O-methyluridine-3'-phosphate
  modified_base 21: mod_base = OTHER; note = 2'-O-methylguanosine-3'-phosphorothioate
  modified_base 22: mod_base = OTHER; note = 2'-O-methylguanosine-3'-phosphorothioate
  modified_base 23: mod_base = OTHER; note = 2'-O-methyladenosine
tgtcaccaaggtggctgtgtgga

SEQ ID NO: 1401 - RNA, 23 nt, synthetic construct
  source 1..23: mol_type = other RNA
  modified_base 1: mod_base = OTHER; note = 2'-O-methyluridine-3'-phosphorothioate 5'-(E)-Vinylphosphonate
  modified_base 2: mod_base = OTHER; note = 2'-deoxy-2'-fluorouridine-3'-phosphorothioate
  modified_base 3: mod_base = OTHER; note = 2'-O-methyladenosine-3'-phosphate
  modified_base 4: mod_base = OTHER; note = 2'-O-methylcytidine-3'-phosphate
  modified_base 5: mod_base = OTHER; note = 2'-O-methyladenosine-3'-phosphate
  modified_base 6: mod_base = OTHER; note = 2'-deoxy-2'-fluoroguanosine-3'-phosphate
  modified_base 7: mod_base = OTHER; note = 2'-O-methylguanosine-3'-phosphate
  modified_base 8: mod_base = OTHER; note = 2'-deoxy-2'-fluorouridine-3'-phosphate
  modified_base 9: mod_base = OTHER; note = 2'-deoxy-2'-fluorocytidine-3'-phosphate
  modified_base 10: mod_base = OTHER; note = 2'-O-methyladenosine-3'-phosphate
  modified_base 11: mod_base = OTHER; note = 2'-O-methylcytidine-3'-phosphate
  modified_base 12: mod_base = OTHER; note = 2'-O-methylcytidine-3'-phosphate
  modified_base 13: mod_base = OTHER; note = 2'-O-methyladenosine-3'-phosphate
  modified_base 14: mod_base = OTHER; note = 2'-deoxy-2'-fluoroadenosine-3'-phosphate
  modified_base 15: mod_base = OTHER; note = 2'-O-methylguanosine-3'-phosphate
  modified_base 16: mod_base = OTHER; note = 2'-deoxy-2'-fluoroguanosine-3'-phosphate
  modified_base 17: mod_base = OTHER; note = 2'-O-methyluridine-3'-phosphate
  modified_base 18: mod_base = OTHER; note = 2'-O-methylguanosine-3'-phosphate
  modified_base 19: mod_base = OTHER; note = 2'-O-methylguanosine-3'-phosphate
  modified_base 20: mod_base = OTHER; note = 2'-O-methylcytidine-3'-phosphate
  modified_base 21: mod_base = OTHER; note = 2'-O-methyluridine-3'-phosphorothioate
  modified_base 22: mod_base = OTHER; note = 2'-O-methylguanosine-3'-phosphorothioate
  modified_base 23: mod_base = OTHER; note = 2'-O-methyluridine
ttacaggtcaccaaggtggctgt

SEQ ID NO: 1402 - RNA, 23 nt, synthetic construct
  source 1..23: mol_type = other RNA
  modified_base 1: mod_base = OTHER; note = 2'-O-methyluridine-3'-phosphorothioate 5'-(E)-Vinylphosphonate
  modified_base 2: mod_base = OTHER; note = 2'-deoxy-2'-fluoroadenosine-3'-phosphorothioate
  modified_base 3: mod_base = OTHER; note = 2'-O-methyladenosine-3'-phosphate
  modified_base 4: mod_base = OTHER; note = 2'-O-methyladenosine-3'-phosphate
  modified_base 5: mod_base = OTHER; note = 2'-O-methyladenosine-3'-phosphate
  modified_base 6: mod_base = OTHER; note = 2'-deoxy-2'-fluoroguanosine-3'-phosphate
  modified_base 7: mod_base = OTHER; note = 2'-O-methyluridine-3'-phosphate
  modified_base 8: mod_base = OTHER; note = 2'-deoxy-2'-fluoroadenosine-3'-phosphate
  modified_base 9: mod_base = OTHER; note = 2'-deoxy-2'-fluorocytidine-3'-phosphate
  modified_base 10: mod_base = OTHER; note = 2'-O-methyladenosine-3'-phosphate
  modified_base 11: mod_base = OTHER; note = 2'-O-methylguanosine-3'-phosphate
  modified_base 12: mod_base = OTHER; note = 2'-O-methylguanosine-3'-phosphate
  modified_base 13: mod_base = OTHER; note = 2'-O-methyluridine-3'-phosphate
  modified_base 14: mod_base = OTHER; note = 2'-deoxy-2'-fluorocytidine-3'-phosphate
  modified_base 15: mod_base = OTHER; note = 2'-O-methyladenosine-3'-phosphate
  modified_base 16: mod_base = OTHER; note = 2'-deoxy-2'-fluorocytidine-3'-phosphate
  modified_base 17: mod_base = OTHER; note = 2'-O-methylcytidine-3'-phosphate
  modified_base 18: mod_base = OTHER; note = 2'-O-methyladenosine-3'-phosphate
  modified_base 19: mod_base = OTHER; note = 2'-O-methyladenosine-3'-phosphate
  modified_base 20: mod_base = OTHER; note = 2'-O-methylguanosine-3'-phosphate
  modified_base 21: mod_base = OTHER; note = 2'-O-methylguanosine-3'-phosphorothioate
  modified_base 22: mod_base = OTHER; note = 2'-O-methyluridine-3'-phosphorothioate
  modified_base 23: mod_base = OTHER; note = 2'-O-methylguanosine
taaaagtacaggtcaccaaggtg

SEQ ID NO: 1403 - RNA, 23 nt, synthetic construct
  source 1..23: mol_type = other RNA
  modified_base 1: mod_base = OTHER; note = 2'-O-methyluridine-3'-phosphorothioate 5'-(E)-Vinylphosphonate
  modified_base 2: mod_base = OTHER; note = 2'-deoxy-2'-fluoroadenosine-3'-phosphorothioate
  modified_base 3: mod_base = OTHER; note = 2'-O-methylguanosine-3'-phosphate
  modified_base 4: mod_base = OTHER; note = 2'-O-methyluridine-3'-phosphate
  modified_base 5: mod_base = OTHER; note = 2'-O-methyladenosine-3'-phosphate
  modified_base 6: mod_base = OTHER; note = 2'-deoxy-2'-fluoroguanosine-3'-phosphate
  modified_base 7: mod_base = OTHER; note = 2'-O-methyladenosine-3'-phosphate
  modified_base 8: mod_base = OTHER; note = 2'-deoxy-2'-fluoroadenosine-3'-phosphate
  modified_base 9: mod_base = OTHER; note = 2'-deoxy-2'-fluoroadenosine-3'-phosphate
  modified_base 10: mod_base = OTHER; note = 2'-O-methyladenosine-3'-phosphate
  modified_base 11: mod_base = OTHER; note = 2'-O-methylguanosine-3'-phosphate
  modified_base 12: mod_base = OTHER; note = 2'-O-methyluridine-3'-phosphate
  modified_base 13: mod_base = OTHER; note = 2'-O-methyladenosine-3'-phosphate
  modified_base 14: mod_base = OTHER; note = 2'-deoxy-2'-fluorocytidine-3'-phosphate
  modified_base 15: mod_base = OTHER; note = 2'-O-methyladenosine-3'-phosphate
  modified_base 16: mod_base = OTHER; note = 2'-deoxy-2'-fluoroguanosine-3'-phosphate
  modified_base 17: mod_base = OTHER; note = 2'-O-methylguanosine-3'-phosphate
  modified_base 18: mod_base = OTHER; note = 2'-O-methyluridine-3'-phosphate
  modified_base 19: mod_base = OTHER; note = 2'-O-methylcytidine-3'-phosphate
  modified_base 20: mod_base = OTHER; note = 2'-O-methyladenosine-3'-phosphate
  modified_base 21: mod_base = OTHER; note = 2'-O-methylcytidine-3'-phosphorothioate
  modified_base 22: mod_base = OTHER; note = 2'-O-methylcytidine-3'-phosphorothioate
  modified_base 23: mod_base = OTHER; note = 2'-O-methyladenosine
tagtagaaaagtacaggtcacca

SEQ ID NO: 1404 - RNA, 23 nt, synthetic construct
  source 1..23: mol_type = other RNA
  modified_base 1: mod_base = OTHER; note = 2'-O-methyluridine-3'-phosphorothioate 5'-(E)-Vinylphosphonate
  modified_base 2: mod_base = OTHER; note = 2'-deoxy-2'-fluoroadenosine-3'-phosphorothioate
  modified_base 3: mod_base = OTHER; note = 2'-O-methyluridine-3'-phosphate
  modified_base 4: mod_base = OTHER; note = 2'-O-methylguanosine-3'-phosphate
  modified_base 5: mod_base = OTHER; note = 2'-O-methyladenosine-3'-phosphate
  modified_base 6: mod_base = OTHER; note = 2'-deoxy-2'-fluorocytidine-3'-phosphate
  modified_base 7: mod_base = OTHER; note = 2'-O-methylcytidine-3'-phosphate
  modified_base 8: mod_base = OTHER; note = 2'-deoxy-2'-fluoroguanosine-3'-phosphate
  modified_base 9: mod_base = OTHER; note = 2'-deoxy-2'-fluorocytidine-3'-phosphate
  modified_base 10: mod_base = OTHER; note = 2'-O-methylcytidine-3'-phosphate
  modified_base 11: mod_base = OTHER; note = 2'-O-methyladenosine-3'-phosphate
  modified_base 12: mod_base = OTHER; note = 2'-O-methylguanosine-3'-phosphate
  modified_base 13: mod_base = OTHER; note = 2'-O-methyluridine-3'-phosphate
  modified_base 14: mod_base = OTHER; note = 2'-deoxy-2'-fluoroadenosine-3'-phosphate
  modified_base 15: mod_base = OTHER; note = 2'-O-methylguanosine-3'-phosphate
  modified_base 16: mod_base = OTHER; note = 2'-deoxy-2'-fluoroadenosine-3'-phosphate
  modified_base 17: mod_base = OTHER; note = 2'-O-methyladenosine-3'-phosphate
  modified_base 18: mod_base = OTHER; note = 2'-O-methyladenosine-3'-phosphate
  modified_base 19: mod_base = OTHER; note = 2'-O-methyladenosine-3'-phosphate
  modified_base 20: mod_base = OTHER; note = 2'-O-methylguanosine-3'-phosphate
  modified_base 21: mod_base = OTHER; note = 2'-O-methyluridine-3'-phosphorothioate
  modified_base 22: mod_base = OTHER; note = 2'-O-methyladenosine-3'-phosphorothioate
  modified_base 23: mod_base = OTHER; note = 2'-O-methylcytidine
tatgaccgccagtagaaaagtac

SEQ ID NO: 1405 - RNA, 23 nt, synthetic construct
  source 1..23: mol_type = other RNA
  modified_base 1: mod_base = OTHER; note = 2'-O-methyluridine-3'-phosphorothioate 5'-(E)-Vinylphosphonate
  modified_base 2: mod_base = OTHER; note = 2'-deoxy-2'-fluoroadenosine-3'-phosphorothioate
  modified_base 3: mod_base = OTHER; note = 2'-O-methylguanosine-3'-phosphate
  modified_base 4: mod_base = OTHER; note = 2'-O-methyladenosine-3'-phosphate
  modified_base 5: mod_base = OTHER; note = 2'-O-methyladenosine-3'-phosphate
  modified_base 6: mod_base = OTHER; note = 2'-deoxy-2'-fluoroguanosine-3'-phosphate
  modified_base 7: mod_base = OTHER; note = 2'-O-methyladenosine-3'-phosphate
  modified_base 8: mod_base = OTHER; note = 2'-deoxy-2'-fluorouridine-3'-phosphate
  modified_base 9: mod_base = OTHER; note = 2'-deoxy-2'-fluoroguanosine-3'-phosphate
  modified_base 10: mod_base = OTHER; note = 2'-O-methyladenosine-3'-phosphate
  modified_base 11: mod_base = OTHER; note = 2'-O-methylcytidine-3'-phosphate
  modified_base 12: mod_base = OTHER; note = 2'-O-methylcytidine-3'-phosphate
  modified_base 13: mod_base = OTHER; note = 2'-O-methylguanosine-3'-phosphate
  modified_base 14: mod_base = OTHER; note = 2'-deoxy-2'-fluorocytidine-3'-phosphate
  modified_base 15: mod_base = OTHER; note = 2'-O-methylcytidine-3'-phosphate
  modified_base 16: mod_base = OTHER; note = 2'-deoxy-2'-fluoroadenosine-3'-phosphate
  modified_base 17: mod_base = OTHER; note = 2'-O-methylguanosine-3'-phosphate
  modified_base 18: mod_base = OTHER; note = 2'-O-methyluridine-3'-phosphate
  modified_base 19: mod_base = OTHER; note = 2'-O-methyladenosine-3'-phosphate
  modified_base 20: mod_base = OTHER; note = 2'-O-methylguanosine-3'-phosphate
  modified_base 21: mod_base = OTHER; note = 2'-O-methyladenosine-3'-phosphorothioate
  modified_base 22: mod_base = OTHER; note = 2'-O-methyladenosine-3'-phosphorothioate
  modified_base 23: mod_base = OTHER; note = 2'-O-methyladenosine
tagaagatgaccgccagtagaaa

SEQ ID NO: 1406 - RNA, 23 nt, synthetic construct
  source 1..23: mol_type = other RNA
  modified_base 1: mod_base = OTHER; note = 2'-O-methyluridine-3'-phosphorothioate 5'-(E)-Vinylphosphonate
  modified_base 2: mod_base = OTHER; note = 2'-deoxy-2'-fluoroadenosine-3'-phosphorothioate
  modified_base 3: mod_base = OTHER; note = 2'-O-methyladenosine-3'-phosphate
  modified_base 4: mod_base = OTHER; note = 2'-O-methylcytidine-3'-phosphate
  modified_base 5: mod_base = OTHER; note = 2'-O-methylcytidine-3'-phosphate
  modified_base 6: mod_base = OTHER; note = 2'-deoxy-2'-fluorocytidine-3'-phosphate
  modified_base 7: mod_base = OTHER; note = 2'-O-methyladenosine-3'-phosphate
  modified_base 8: mod_base = OTHER; note = 2'-deoxy-2'-fluoroguanosine-3'-phosphate
  modified_base 9: mod_base = OTHER; note = 2'-deoxy-2'-fluoroguanosine-3'-phosphate
  modified_base 10: mod_base = OTHER; note = 2'-O-methylcytidine-3'-phosphate
  modified_base 11: mod_base = OTHER; note = 2'-O-methyladenosine-3'-phosphate
  modified_base 12: mod_base = OTHER; note = 2'-O-methylguanosine-3'-phosphate
  modified_base 13: mod_base = OTHER; note = 2'-O-methyladenosine-3'-phosphate
  modified_base 14: mod_base = OTHER; note = 2'-deoxy-2'-fluoroadenosine-3'-phosphate
  modified_base 15: mod_base = OTHER; note = 2'-O-methylguanosine-3'-phosphate
  modified_base 16: mod_base = OTHER; note = 2'-deoxy-2'-fluoroadenosine-3'-phosphate
  modified_base 17: mod_base = OTHER; note = 2'-O-methyluridine-3'-phosphate
  modified_base 18: mod_base = OTHER; note = 2'-O-methylguanosine-3'-phosphate
  modified_base 19: mod_base = OTHER; note = 2'-O-methyladenosine-3'-phosphate
  modified_base 20: mod_base = OTHER; note = 2'-O-methylcytidine-3'-phosphate
  modified_base 21: mod_base = OTHER; note = 2'-O-methylcytidine-3'-phosphorothioate
  modified_base 22: mod_base = OTHER; note = 2'-O-methylguanosine-3'-phosphorothioate
  modified_base 23: mod_base = OTHER; note = 2'-O-methylcytidine
taacccaggcagaagatgaccgc

SEQ ID NO: 1407 - RNA, 23 nt, synthetic construct
  source 1..23: mol_type = other RNA
  modified_base 1: mod_base = OTHER; note = 2'-O-methyluridine-3'-phosphorothioate 5'-(E)-Vinylphosphonate
  modified_base 2: mod_base = OTHER; note = 2'-deoxy-2'-fluorocytidine-3'-phosphorothioate
  modified_base 3: mod_base = OTHER; note = 2'-O-methylcytidine-3'-phosphate
  modified_base 4: mod_base = OTHER; note = 2'-O-methyladenosine-3'-phosphate
  modified_base 5: mod_base = OTHER; note = 2'-O-methyluridine-3'-phosphate
  modified_base 6: mod_base = OTHER; note = 2'-deoxy-2'-fluoroadenosine-3'-phosphate
  modified_base 7: mod_base = OTHER; note = 2'-O-methylguanosine-3'-phosphate
  modified_base 8: mod_base = OTHER; note = 2'-deoxy-2'-fluoroguanosine-3'-phosphate
  modified_base 9: mod_base = OTHER; note = 2'-deoxy-2'-fluoroadenosine-3'-phosphate
  modified_base 10: mod_base = OTHER; note = 2'-O-methyladenosine-3'-phosphate
  modified_base 11: mod_base = OTHER; note = 2'-O-methylcytidine-3'-phosphate
  modified_base 12: mod_base = OTHER; note = 2'-O-methylcytidine-3'-phosphate
  modified_base 13: mod_base = OTHER; note = 2'-O-methylcytidine-3'-phosphate
  modified_base 14: mod_base = OTHER; note = 2'-deoxy-2'-fluoroadenosine-3'-phosphate
  modified_base 15: mod_base = OTHER; note = 2'-O-methylguanosine-3'-phosphate
  modified_base 16: mod_base = OTHER; note = 2'-deoxy-2'-fluoroguanosine-3'-phosphate
  modified_base 17: mod_base = OTHER; note = 2'-O-methylcytidine-3'-phosphate
  modified_base 18: mod_base = OTHER; note = 2'-O-methyladenosine-3'-phosphate
  modified_base 19: mod_base = OTHER; note = 2'-O-methylguanosine-3'-phosphate
  modified_base 20: mod_base = OTHER; note = 2'-O-methyladenosine-3'-phosphate
  modified_base 21: mod_base = OTHER; note = 2'-O-methyladenosine-3'-phosphorothioate
  modified_base 22: mod_base = OTHER; note = 2'-O-methylguanosine-3'-phosphorothioate
  modified_base 23: mod_base = OTHER; note = 2'-O-methyladenosine
tccataggaacccaggcagaaga

SEQ ID NO: 1408 - RNA, 23 nt, synthetic construct
  source 1..23: mol_type = other RNA
  modified_base 1: mod_base = OTHER; note = 2'-O-methyluridine-3'-phosphorothioate 5'-(E)-Vinylphosphonate
  modified_base 2: mod_base = OTHER; note = 2'-deoxy-2'-fluoroadenosine-3'-phosphorothioate
  modified_base 3: mod_base = OTHER; note = 2'-O-methylguanosine-3'-phosphate
  modified_base 4: mod_base = OTHER; note = 2'-O-methyluridine-3'-phosphate
  modified_base 5: mod_base = OTHER; note = 2'-O-methyluridine-3'-phosphate
  modified_base 6: mod_base = OTHER; note = 2'-deoxy-2'-fluoroguanosine-3'-phosphate
  modified_base 7: mod_base = OTHER; note = 2'-O-methylcytidine-3'-phosphate
  modified_base 8: mod_base = OTHER; note = 2'-deoxy-2'-fluorocytidine-3'-phosphate
  modified_base 9: mod_base = OTHER; note = 2'-deoxy-2'-fluoroadenosine-3'-phosphate
  modified_base 10: mod_base = OTHER; note = 2'-O-methyluridine-3'-phosphate
  modified_base 11: mod_base = OTHER; note = 2'-O-methyladenosine-3'-phosphate
  modified_base 12: mod_base = OTHER; note = 2'-O-methylguanosine-3'-phosphate
  modified_base 13: mod_base = OTHER; note = 2'-O-methylguanosine-3'-phosphate
  modified_base 14: mod_base = OTHER; note = 2'-deoxy-2'-fluoroadenosine-3'-phosphate
  modified_base 15: mod_base = OTHER; note = 2'-O-methyladenosine-3'-phosphate
  modified_base 16: mod_base = OTHER; note = 2'-deoxy-2'-fluorocytidine-3'-phosphate
  modified_base 17: mod_base = OTHER; note = 2'-O-methylcytidine-3'-phosphate
  modified_base 18: mod_base = OTHER; note = 2'-O-methylcytidine-3'-phosphate
  modified_base 19: mod_base = OTHER; note = 2'-O-methyladenosine-3'-phosphate
  modified_base 20: mod_base = OTHER; note = 2'-O-methylguanosine-3'-phosphate
  modified_base 21: mod_base = OTHER; note = 2'-O-methylguanosine-3'-phosphorothioate
  modified_base 22: mod_base = OTHER; note = 2'-O-methylcytidine-3'-phosphorothioate
  modified_base 23: mod_base = OTHER; note = 2'-O-methyladenosine
tagttgccataggaacccaggca

SEQ ID NO: 1409 - RNA, 23 nt, synthetic construct
  source 1..23: mol_type = other RNA
  modified_base 1: mod_base = OTHER; note = 2'-O-methyluridine-3'-phosphorothioate 5'-(E)-Vinylphosphonate
  modified_base 2: mod_base = OTHER; note = 2'-deoxy-2'-fluoroadenosine-3'-phosphorothioate
  modified_base 3: mod_base = OTHER; note = 2'-O-methyladenosine-3'-phosphate
  modified_base 4: mod_base = OTHER; note = 2'-O-methyluridine-3'-phosphate
  modified_base 5: mod_base = OTHER; note = 2'-O-methylguanosine-3'-phosphate
  modified_base 6: mod_base = OTHER; note = 2'-deoxy-2'-fluoroadenosine-3'-phosphate
  modified_base 7: mod_base = OTHER; note = 2'-O-methyladenosine-3'-phosphate
  modified_base 8: mod_base = OTHER; note = 2'-deoxy-2'-fluoroguanosine-3'-phosphate
  modified_base 9: mod_base = OTHER; note = 2'-deoxy-2'-fluorouridine-3'-phosphate
  modified_base 10: mod_base = OTHER; note = 2'-O-methyluridine-3'-phosphate
  modified_base 11: mod_base = OTHER; note = 2'-O-methylguanosine-3'-phosphate
  modified_base 12: mod_base = OTHER; note = 2'-O-methylcytidine-3'-phosphate
  modified_base 13: mod_base = OTHER; note = 2'-O-methylcytidine-3'-phosphate
  modified_base 14: mod_base = OTHER; note = 2'-deoxy-2'-fluoroadenosine-3'-phosphate
  modified_base 15: mod_base = OTHER; note = 2'-O-methyluridine-3'-phosphate
  modified_base 16: mod_base = OTHER; note = 2'-deoxy-2'-fluoroadenosine-3'-phosphate
  modified_base 17: mod_base = OTHER; note = 2'-O-methylguanosine-3'-phosphate
  modified_base 18: mod_base = OTHER; note = 2'-O-methylguanosine-3'-phosphate
  modified_base 19: mod_base = OTHER; note = 2'-O-methyladenosine-3'-phosphate
  modified_base 20: mod_base = OTHER; note = 2'-O-methyladenosine-3'-phosphate
  modified_base 21: mod_base = OTHER; note = 2'-O-methylcytidine-3'-phosphorothioate
  modified_base 22: mod_base = OTHER; note = 2'-O-methylcytidine-3'-phosphorothioate
  modified_base 23: mod_base = OTHER; note = 2'-O-methylcytidine
taatgaagttgccataggaaccc

SEQ ID NO: 1410 - RNA, 23 nt, synthetic construct
  source 1..23: mol_type = other RNA
  modified_base 1: mod_base = OTHER; note = 2'-O-methyluridine-3'-phosphorothioate 5'-(E)-Vinylphosphonate
  modified_base 2: mod_base = OTHER; note = 2'-deoxy-2'-fluoroadenosine-3'-phosphorothioate
  modified_base 3: mod_base = OTHER; note = 2'-O-methyladenosine-3'-phosphate
  modified_base 4: mod_base = OTHER; note = 2'-O-methylguanosine-3'-phosphate
  modified_base 5: mod_base = OTHER; note = 2'-O-methyladenosine-3'-phosphate
  modified_base 6: mod_base = OTHER; note = 2'-deoxy-2'-fluorocytidine-3'-phosphate
  modified_base 7: mod_base = OTHER; note = 2'-O-methyladenosine-3'-phosphate
  modified_base 8: mod_base = OTHER; note = 2'-deoxy-2'-fluoroadenosine-3'-phosphate
  modified_base 9: mod_base = OTHER; note = 2'-deoxy-2'-fluorouridine-3'-phosphate
  modified_base 10: mod_base = OTHER; note = 2'-O-methylguanosine-3'-phosphate
  modified_base 11: mod_base = OTHER; note = 2'-O-methyladenosine-3'-phosphate
  modified_base 12: mod_base = OTHER; note = 2'-O-methyladenosine-3'-phosphate
  modified_base 13: mod_base = OTHER; note = 2'-O-methylguanosine-3'-phosphate
  modified_base 14: mod_base = OTHER; note = 2'-deoxy-2'-fluorouridine-3'-phosphate
  modified_base 15: mod_base = OTHER; note = 2'-O-methyluridine-3'-phosphate
  modified_base 16: mod_base = OTHER; note = 2'-deoxy-2'-fluoroguanosine-3'-phosphate
  modified_base 17: mod_base = OTHER; note = 2'-O-methylcytidine-3'-phosphate
  modified_base 18: mod_base = OTHER; note = 2'-O-methylcytidine-3'-phosphate
  modified_base 19: mod_base = OTHER; note = 2'-O-methyladenosine-3'-phosphate
  modified_base 20: mod_base = OTHER; note = 2'-O-methyluridine-3'-phosphate
  modified_base 21: mod_base = OTHER; note = 2'-O-methyladenosine-3'-phosphorothioate
  modified_base 22: mod_base = OTHER; note = 2'-O-methylguanosine-3'-phosphorothioate
  modified_base 23: mod_base = OTHER; note = 2'-O-methylguanosine
taagacaatgaagttgccatagg

SEQ ID NO: 1411 - RNA, 23 nt, synthetic construct
  source 1..23: mol_type = other RNA
  modified_base 1: mod_base = OTHER; note = 2'-O-methyluridine-3'-phosphorothioate 5'-(E)-Vinylphosphonate
  modified_base 2: mod_base = OTHER; note = 2'-deoxy-2'-fluoroadenosine-3'-phosphorothioate
  modified_base 3: mod_base = OTHER; note = 2'-O-methylcytidine-3'-phosphate
  modified_base 4: mod_base = OTHER; note = 2'-O-methyladenosine-3'-phosphate
  modified_base 5: mod_base = OTHER; note = 2'-O-methyladenosine-3'-phosphate
  modified_base 6: mod_base = OTHER; note = 2'-deoxy-2'-fluoroguanosine-3'-phosphate
  modified_base 7: mod_base = OTHER; note = 2'-O-methyladenosine-3'-phosphate
  modified_base 8: mod_base = OTHER; note = 2'-deoxy-2'-fluoroadenosine-3'-phosphate
  modified_base 9: mod_base = OTHER; note = 2'-deoxy-2'-fluoroguanosine-3'-phosphate
  modified_base 10: mod_base = OTHER; note = 2'-O-methyladenosine-3'-phosphate
  modified_base 11: mod_base = OTHER; note = 2'-O-methylcytidine-3'-phosphate
  modified_base 12: mod_base = OTHER; note = 2'-O-methyladenosine-3'-phosphate
  modified_base 13: mod_base = OTHER; note = 2'-O-methyladenosine-3'-phosphate
  modified_base 14: mod_base = OTHER; note = 2'-deoxy-2'-fluorouridine-3'-phosphate
  modified_base 15: mod_base = OTHER; note = 2'-O-methylguanosine-3'-phosphate
  modified_base 16: mod_base = OTHER; note = 2'-deoxy-2'-fluoroadenosine-3'-phosphate
  modified_base 17: mod_base = OTHER; note = 2'-O-methyladenosine-3'-phosphate
  modified_base 18: mod_base = OTHER; note = 2'-O-methylguanosine-3'-phosphate
  modified_base 19: mod_base = OTHER; note = 2'-O-methyluridine-3'-phosphate
  modified_base 20: mod_base = OTHER; note = 2'-O-methyluridine-3'-phosphate
  modified_base 21: mod_base = OTHER; note = 2'-O-methylguanosine-3'-phosphorothioate
  modified_base 22: mod_base = OTHER; note = 2'-O-methylcytidine-3'-phosphorothioate
  modified_base 23: mod_base = OTHER; note = 2'-O-methylcytidine
tacaagaagacaatgaagttgcc

SEQ ID NO: 1412 - RNA, 23 nt, synthetic construct
  source 1..23: mol_type = other RNA
  modified_base 1: mod_base = OTHER; note = 2'-O-methyluridine-3'-phosphorothioate 5'-(E)-Vinylphosphonate
  modified_base 2: mod_base = OTHER; note = 2'-deoxy-2'-fluoroguanosine-3'-phosphorothioate
  modified_base 3: mod_base = OTHER; note = 2'-O-methyladenosine-3'-phosphate
  modified_base 4: mod_base = OTHER; note = 2'-O-methyladenosine-3'-phosphate
  modified_base 5: mod_base = OTHER; note = 2'-O-methylguanosine-3'-phosphate
  modified_base 6: mod_base = OTHER; note = 2'-deoxy-2'-fluoroguanosine-3'-phosphate
  modified_base 7: mod_base = OTHER; note = 2'-O-methyladenosine-3'-phosphate
  modified_base 8: mod_base = OTHER; note = 2'-deoxy-2'-fluorocytidine-3'-phosphate
  modified_base 9: mod_base = OTHER; note = 2'-deoxy-2'-fluoroadenosine-3'-phosphate
  modified_base 10: mod_base = OTHER; note = 2'-O-methyladenosine-3'-phosphate
  modified_base 11: mod_base = OTHER; note = 2'-O-methylguanosine-3'-phosphate
  modified_base 12: mod_base = OTHER; note = 2'-O-methyladenosine-3'-phosphate
  modified_base 13: mod_base = OTHER; note = 2'-O-methyladenosine-3'-phosphate
  modified_base 14: mod_base = OTHER; note = 2'-deoxy-2'-fluoroguanosine-3'-phosphate
  modified_base 15: mod_base = OTHER; note = 2'-O-methyladenosine-3'-phosphate
  modified_base 16: mod_base = OTHER; note = 2'-deoxy-2'-fluorocytidine-3'-phosphate
  modified_base 17: mod_base = OTHER; note = 2'-O-methyladenosine-3'-phosphate
  modified_base 18: mod_base = OTHER; note = 2'-O-methyladenosine-3'-phosphate
  modified_base 19: mod_base = OTHER; note = 2'-O-methyluridine-3'-phosphate
  modified_base 20: mod_base = OTHER; note = 2'-O-methylguanosine-3'-phosphate
  modified_base 21: mod_base = OTHER; note = 2'-O-methyladenosine-3'-phosphorothioate
  modified_base 22: mod_base = OTHER; note = 2'-O-methyladenosine-3'-phosphorothioate
  modified_base 23: mod_base = OTHER; note = 2'-O-methylguanosine
tgaaggacaagaagacaatgaag

SEQ ID NO: 1413 - RNA, 23 nt, synthetic construct
  source 1..23: mol_type = other RNA
  modified_base 1: mod_base = OTHER; note = 2'-O-methyluridine-3'-phosphorothioate 5'-(E)-Vinylphosphonate
  modified_base 2: mod_base = OTHER; note = 2'-deoxy-2'-fluorouridine-3'-phosphorothioate
  modified_base 3: mod_base = OTHER; note = 2'-O-methylcytidine-3'-phosphate
  modified_base 4: mod_base = OTHER; note = 2'-O-methylguanosine-3'-phosphate
  modified_base 5: mod_base = OTHER; note = 2'-O-methyladenosine-3'-phosphate
  modified_base 6: mod_base = OTHER; note = 2'-deoxy-2'-fluoroadenosine-3'-phosphate
  modified_base 7: mod_base = OTHER; note = 2'-O-methylguanosine-3'-phosphate
  modified_base 8: mod_base = OTHER; note = 2'-deoxy-2'-fluoroadenosine-3'-phosphate
  modified_base 9: mod_base = OTHER; note = 2'-deoxy-2'-fluoroadenosine-3'-phosphate
  modified_base 10: mod_base = OTHER; note = 2'-O-methylguanosine-3'-phosphate
  modified_base 11: mod_base = OTHER; note = 2'-O-methylguanosine-3'-phosphate
  modified_base 12: mod_base = OTHER; note = 2'-O-methyladenosine-3'-phosphate
  modified_base 13: mod_base = OTHER; note = 2'-O-methylcytidine-3'-phosphate
  modified_base 14: mod_base = OTHER; note = 2'-deoxy-2'-fluoroadenosine-3'-phosphate
  modified_base 15: mod_base = OTHER; note = 2'-O-methyladenosine-3'-phosphate
  modified_base 16: mod_base = OTHER; note = 2'-deoxy-2'-fluoroguanosine-3'-phosphate
  modified_base 17: mod_base = OTHER; note = 2'-O-methyladenosine-3'-phosphate
  modified_base 18: mod_base = OTHER; note = 2'-O-methyladenosine-3'-phosphate
  modified_base 19: mod_base = OTHER; note = 2'-O-methylguanosine-3'-phosphate
  modified_base 20: mod_base = OTHER; note = 2'-O-methyladenosine-3'-phosphate
  modified_base 21: mod_base = OTHER; note = 2'-O-methylcytidine-3'-phosphorothioate
  modified_base 22: mod_base = OTHER; note = 2'-O-methyladenosine-3'-phosphorothioate
  modified_base 23: mod_base = OTHER; note = 2'-O-methyladenosine
ttcgaagaaggacaagaagacaa

SEQ ID NO: 1414 - RNA, 23 nt, synthetic construct
  source 1..23: mol_type = other RNA
  modified_base 1: mod_base = OTHER; note = 2'-O-methyluridine-3'-phosphorothioate 5'-(E)-Vinylphosphonate
  modified_base 2: mod_base = OTHER; note = 2'-deoxy-2'-fluorocytidine-3'-phosphorothioate
  modified_base 3: mod_base = OTHER; note = 2'-O-methyluridine-3'-phosphate
  modified_base 4: mod_base = OTHER; note = 2'-O-methylguanosine-3'-phosphate
  modified_base 5: mod_base = OTHER; note = 2'-O-methylguanosine-3'-phosphate
  modified_base 6: mod_base = OTHER; note = 2'-deoxy-2'-fluoroadenosine-3'-phosphate
  modified_base 7: mod_base = OTHER; note = 2'-O-methyluridine-3'-phosphate
  modified_base 8: mod_base = OTHER; note = 2'-deoxy-2'-fluorocytidine-3'-phosphate
  modified_base 9: mod_base = OTHER; note = 2'-deoxy-2'-fluoroguanosine-3'-phosphate
  modified_base 10: mod_base = OTHER; note = 2'-O-methyladenosine-3'-phosphate
  modified_base 11: mod_base = OTHER; note = 2'-O-methyladenosine-3'-phosphate
  modified_base 12: mod_base = OTHER; note = 2'-O-methylguanosine-3'-phosphate
  modified_base 13: mod_base = OTHER; note = 2'-O-methyladenosine-3'-phosphate
  modified_base 14: mod_base = OTHER; note = 2'-deoxy-2'-fluoroadenosine-3'-phosphate
  modified_base 15: mod_base = OTHER; note = 2'-O-methylguanosine-3'-phosphate
  modified_base 16: mod_base = OTHER; note = 2'-deoxy-2'-fluoroguanosine-3'-phosphate
  modified_base 17: mod_base = OTHER; note = 2'-O-methyladenosine-3'-phosphate
  modified_base 18: mod_base = OTHER; note = 2'-O-methylcytidine-3'-phosphate
  modified_base 19: mod_base = OTHER; note = 2'-O-methyladenosine-3'-phosphate
  modified_base 20: mod_base = OTHER; note = 2'-O-methyladenosine-3'-phosphate
  modified_base 21: mod_base = OTHER; note = 2'-O-methylguanosine-3'-phosphorothioate
  modified_base 22: mod_base = OTHER; note = 2'-O-methyladenosine-3'-phosphorothioate
  modified_base 23: mod_base = OTHER; note = 2'-O-methyladenosine
tctggatcgaagaaggacaagaa

SEQ ID NO: 1415 - RNA, 23 nt, synthetic construct
  source 1..23: mol_type = other RNA
  modified_base 1: mod_base = OTHER; note = 2'-O-methyluridine-3'-phosphorothioate 5'-(E)-Vinylphosphonate
  modified_base 2: mod_base = OTHER; note = 2'-deoxy-2'-fluoroguanosine-3'-phosphorothioate
  modified_base 3: mod_base = OTHER; note = 2'-O-methyladenosine-3'-phosphate
  modified_base 4: mod_base = OTHER; note = 2'-O-methyladenosine-3'-phosphate
  modified_base 5: mod_base = OTHER; note = 2'-O-methylguanosine-3'-phosphate
  modified_base 6: mod_base = OTHER; note = 2'-deoxy-2'-fluoroguanosine-3'-phosphate
  modified_base 7: mod_base = OTHER; note = 2'-O-methylcytidine-3'-phosphate
  modified_base 8: mod_base = OTHER; note = 2'-deoxy-2'-fluorouridine-3'-phosphate
  modified_base 9: mod_base = OTHER; note = 2'-deoxy-2'-fluoroguanosine-3'-phosphate
  modified_base 10: mod_base = OTHER; note = 2'-O-methylguanosine-3'-phosphate
  modified_base 11: mod_base = OTHER; note = 2'-O-methyladenosine-3'-phosphate
  modified_base 12: mod_base = OTHER; note = 2'-O-methyluridine-3'-phosphate
  modified_base 13: mod_base = OTHER; note = 2'-O-methylcytidine-3'-phosphate
  modified_base 14: mod_base = OTHER; note = 2'-deoxy-2'-fluoroguanosine-3'-phosphate
  modified_base 15: mod_base = OTHER; note = 2'-O-methyladenosine-3'-phosphate
  modified_base 16: mod_base = OTHER; note = 2'-deoxy-2'-fluoroadenosine-3'-phosphate
  modified_base 17: mod_base = OTHER; note = 2'-O-methylguanosine-3'-phosphate
  modified_base 18: mod_base = OTHER; note = 2'-O-methyladenosine-3'-phosphate
  modified_base 19: mod_base = OTHER; note = 2'-O-methyladenosine-3'-phosphate
  modified_base 20: mod_base = OTHER; note = 2'-O-methylguanosine-3'-phosphate
  modified_base 21: mod_base = OTHER; note = 2'-O-methylguanosine-3'-phosphorothioate
  modified_base 22: mod_base = OTHER; note = 2'-O-methyladenosine-3'-phosphorothioate
  modified_base 23: mod_base = OTHER; note = 2'-O-methylcytidine
tgaaggctggatcgaagaaggac

SEQ ID NO: 1416 - RNA, 23 nt, synthetic construct
  source 1..23: mol_type = other RNA
  modified_base 1: mod_base = OTHER; note = 2'-O-methyluridine-3'-phosphorothioate 5'-(E)-Vinylphosphonate
  modified_base 2: mod_base = OTHER; note = 2'-deoxy-2'-fluoroadenosine-3'-phosphorothioate
  modified_base 3: mod_base = OTHER; note = 2'-O-methyladenosine-3'-phosphate
  modified_base 4: mod_base = OTHER; note = 2'-O-methyluridine-3'-phosphate
  modified_base 5: mod_base = OTHER; note = 2'-O-methyluridine-3'-phosphate
  modified_base 6: mod_base = OTHER; note = 2'-deoxy-2'-fluorouridine-3'-phosphate
  modified_base 7: mod_base = OTHER; note = 2'-O-methylcytidine-3'-phosphate
  modified_base 8: mod_base = OTHER; note = 2'-deoxy-2'-fluorocytidine-3'-phosphate
  modified_base 9: mod_base = OTHER; note = 2'-deoxy-2'-fluorouridine-3'-phosphate
  modified_base 10: mod_base = OTHER; note = 2'-O-methylguanosine-3'-phosphate
  modified_base 11: mod_base = OTHER; note = 2'-O-methyladenosine-3'-phosphate
  modified_base 12: mod_base = OTHER; note = 2'-O-methyladenosine-3'-phosphate
  modified_base 13: mod_base = OTHER; note = 2'-O-methylguanosine-3'-phosphate
  modified_base 14: mod_base = OTHER; note = 2'-deoxy-2'-fluoroguanosine-3'-phosphate
  modified_base 15: mod_base = OTHER; note = 2'-O-methylcytidine-3'-phosphate
  modified_base 16: mod_base = OTHER; note = 2'-deoxy-2'-fluorouridine-3'-phosphate
  modified_base 17: mod_base = OTHER; note = 2'-O-methylguanosine-3'-phosphate
  modified_base 18: mod_base = OTHER; note = 2'-O-methylguanosine-3'-phosphate
  modified_base 19: mod_base = OTHER; note = 2'-O-methyladenosine-3'-phosphate
  modified_base 20: mod_base = OTHER; note = 2'-O-methyluridine-3'-phosphate
  modified_base 21: mod_base = OTHER; note = 2'-O-methylcytidine-3'-phosphorothioate
  modified_base 22: mod_base = OTHER; note = 2'-O-methylguanosine-3'-phosphorothioate
  modified_base 23: mod_base = OTHER; note = 2'-O-methyladenosine
taatttcctgaaggctggatcga

SEQ ID NO: 1417 - RNA, 23 nt, synthetic construct
  source 1..23: mol_type = other RNA
  modified_base 1: mod_base = OTHER; note = 2'-O-methyluridine-3'-phosphorothioate 5'-(E)-Vinylphosphonate
  modified_base 2: mod_base = OTHER; note = 2'-deoxy-2'-fluorouridine-3'-phosphorothioate
  modified_base 3: mod_base = OTHER; note = 2'-O-methyluridine-3'-phosphate
  modified_base 4: mod_base = OTHER; note = 2'-O-methylcytidine-3'-phosphate
  modified_base 5: mod_base = OTHER; note = 2'-O-methyluridine-3'-phosphate
  modified_base 6: mod_base = OTHER; note = 2'-deoxy-2'-fluoroguanosine-3'-phosphate
  modified_base 7: mod_base = OTHER; note = 2'-O-methyladenosine-3'-phosphate
  modified_base 8: mod_base = OTHER; note = 2'-deoxy-2'-fluoroadenosine-3'-phosphate
  modified_base 9: mod_base = OTHER; note = 2'-deoxy-2'-fluorouridine-3'-phosphate
  modified_base 10: mod_base = OTHER; note = 2'-O-methyluridine-3'-phosphate
  modified_base 11: mod_base = OTHER; note = 2'-O-methyluridine-3'-phosphate
  modified_base 12: mod_base = OTHER; note = 2'-O-methylcytidine-3'-phosphate
  modified_base 13: mod_base = OTHER; note = 2'-O-methylcytidine-3'-phosphate
  modified_base 14: mod_base = OTHER; note = 2'-deoxy-2'-fluorouridine-3'-phosphate
  modified_base 15: mod_base = OTHER; note = 2'-O-methylguanosine-3'-phosphate
  modified_base 16: mod_base = OTHER; note = 2'-deoxy-2'-fluoroadenosine-3'-phosphate
  modified_base 17: mod_base = OTHER; note = 2'-O-methyladenosine-3'-phosphate
  modified_base 18: mod_base = OTHER; note = 2'-O-methylguanosine-3'-phosphate
  modified_base 19: mod_base = OTHER; note = 2'-O-methylguanosine-3'-phosphate
  modified_base 20: mod_base = OTHER; note = 2'-O-methylcytidine-3'-phosphate
  modified_base 21: mod_base = OTHER; note = 2'-O-methyluridine-3'-phosphorothioate
  modified_base 22: mod_base = OTHER; note = 2'-O-methylguanosine-3'-phosphorothioate
  modified_base 23: mod_base = OTHER; note = 2'-O-methylguanosine
tttctgaatttcctgaaggctgg

SEQ ID NO: 1418 - RNA, 23 nt, synthetic construct
  source 1..23: mol_type = other RNA
  modified_base 1: mod_base = OTHER; note = 2'-O-methyluridine-3'-phosphorothioate 5'-(E)-Vinylphosphonate
  modified_base 2: mod_base = OTHER; note = 2'-deoxy-2'-fluoroguanosine-3'-phosphorothioate
  modified_base 3: mod_base = OTHER; note = 2'-O-methyluridine-3'-phosphate
  modified_base 4: mod_base = OTHER; note = 2'-O-methyluridine-3'-phosphate
  modified_base 5: mod_base = OTHER; note = 2'-O-methylguanosine-3'-phosphate
  modified_base 6: mod_base = OTHER; note = 2'-deoxy-2'-fluoroguanosine-3'-phosphate
  modified_base 7: mod_base = OTHER; note = 2'-O-methyluridine-3'-phosphate
  modified_base 8: mod_base = OTHER; note = 2'-deoxy-2'-fluorouridine-3'-phosphate
  modified_base 9: mod_base = OTHER; note = 2'-deoxy-2'-fluorocytidine-3'-phosphate
  modified_base 10: mod_base = OTHER; note = 2'-O-methyluridine-3'-phosphate
  modified_base 11: mod_base = OTHER; note = 2'-O-methylguanosine-3'-phosphate
  modified_base 12: mod_base = OTHER; note = 2'-O-methyladenosine-3'-phosphate
  modified_base 13: mod_base = OTHER; note = 2'-O-methyladenosine-3'-phosphate
  modified_base 14: mod_base = OTHER; note = 2'-deoxy-2'-fluorouridine-3'-phosphate
  modified_base 15: mod_base = OTHER; note = 2'-O-methyluridine-3'-phosphate
  modified_base 16: mod_base = OTHER; note = 2'-deoxy-2'-fluorouridine-3'-phosphate
  modified_base 17: mod_base = OTHER; note = 2'-O-methylcytidine-3'-phosphate
  modified_base 18: mod_base = OTHER; note = 2'-O-methylcytidine-3'-phosphate
  modified_base 19: mod_base = OTHER; note = 2'-O-methyluridine-3'-phosphate
  modified_base 20: mod_base = OTHER; note = 2'-O-methylguanosine-3'-phosphate
  modified_base 21: mod_base = OTHER; note = 2'-O-methyladenosine-3'-phosphorothioate
  modified_base 22: mod_base = OTHER; note = 2'-O-methyladenosine-3'-phosphorothioate
  modified_base 23: mod_base = OTHER; note = 2'-O-methylguanosine
tgttggttctgaatttcctgaag

SEQ ID NO: 1419 - RNA, 23 nt, synthetic construct
  source 1..23: mol_type = other RNA
  modified_base 1: mod_base = OTHER; note = 2'-O-methyluridine-3'-phosphorothioate 5'-(E)-Vinylphosphonate
  modified_base 2: mod_base = OTHER; note = 2'-deoxy-2'-fluoroadenosine-3'-phosphorothioate
  modified_base 3: mod_base = OTHER; note = 2'-O-methyladenosine-3'-phosphate
  modified_base 4: mod_base = OTHER; note = 2'-O-methyluridine-3'-phosphate
  modified_base 5: mod_base = OTHER; note = 2'-O-methylcytidine-3'-phosphate
  modified_base 6: mod_base = OTHER; note = 2'-deoxy-2'-fluoroadenosine-3'-phosphate
  modified_base 7: mod_base = OTHER; note = 2'-O-methyladenosine-3'-phosphate
  modified_base 8: mod_base = OTHER; note = 2'-deoxy-2'-fluoroadenosine-3'-phosphate
  modified_base 9: mod_base = OTHER; note = 2'-deoxy-2'-fluoroguanosine-3'-phosphate
  modified_base 10: mod_base = OTHER; note = 2'-O-methyluridine-3'-phosphate
  modified_base 11: mod_base = OTHER; note = 2'-O-methyluridine-3'-phosphate
  modified_base 12: mod_base = OTHER; note = 2'-O-methylguanosine-3'-phosphate
  modified_base 13: mod_base = OTHER; note = 2'-O-methylguanosine-3'-phosphate
  modified_base 14: mod_base = OTHER; note = 2'-deoxy-2'-fluorouridine-3'-phosphate
  modified_base 15: mod_base = OTHER; note = 2'-O-methyluridine-3'-phosphate
  modified_base 16: mod_base = OTHER; note = 2'-deoxy-2'-fluorocytidine-3'-phosphate
  modified_base 17: mod_base = OTHER; note = 2'-O-methyluridine-3'-phosphate
  modified_base 18: mod_base = OTHER; note = 2'-O-methylguanosine-3'-phosphate
  modified_base 19: mod_base = OTHER; note = 2'-O-methyladenosine-3'-phosphate
  modified_base 20: mod_base = OTHER; note = 2'-O-methyladenosine-3'-phosphate
  modified_base 21: mod_base = OTHER; note = 2'-O-methyluridine-3'-phosphorothioate
  modified_base 22: mod_base = OTHER; note = 2'-O-methyluridine-3'-phosphorothioate
  modified_base 23: mod_base = OTHER; note = 2'-O-methyluridine
taatcaaagttggttctgaattt

SEQ ID NO: 1420 - RNA, 23 nt, synthetic construct
  source 1..23: mol_type = other RNA
  modified_base 1: mod_base = OTHER; note = 2'-O-methyluridine-3'-phosphorothioate 5'-(E)-Vinylphosphonate
  modified_base 2: mod_base = OTHER; note = 2'-deoxy-2'-fluorouridine-3'-phosphorothioate
  modified_base 3: mod_base = OTHER; note = 2'-O-methylcytidine-3'-phosphate
  modified_base 4: mod_base = OTHER; note = 2'-O-methyladenosine-3'-phosphate
  modified_base 5: mod_base = OTHER; note = 2'-O-methyluridine-3'-phosphate
  modified_base 6: mod_base = OTHER; note = 2'-deoxy-2'-fluoroguanosine-3'-phosphate
  modified_base 7: mod_base = OTHER; note = 2'-O-methyladenosine-3'-phosphate
  modified_base 8: mod_base = OTHER; note = 2'-deoxy-2'-fluoroadenosine-3'-phosphate
  modified_base 9: mod_base = OTHER; note = 2'-deoxy-2'-fluoroadenosine-3'-phosphate
  modified_base 10: mod_base = OTHER; note = 2'-O-methyluridine-3'-phosphate
  modified_base 11: mod_base = OTHER; note = 2'-O-methylcytidine-3'-phosphate
  modified_base 12: mod_base = OTHER; note = 2'-O-methyladenosine-3'-phosphate
  modified_base 13: mod_base = OTHER; note = 2'-O-methyladenosine-3'-phosphate
  modified_base 14: mod_base = OTHER; note = 2'-deoxy-2'-fluoroadenosine-3'-phosphate
  modified_base 15: mod_base = OTHER; note = 2'-O-methylguanosine-3'-phosphate
  modified_base 16: mod_base = OTHER; note = 2'-deoxy-2'-fluorouridine-3'-phosphate
  modified_base 17: mod_base = OTHER; note = 2'-O-methyluridine-3'-phosphate
  modified_base 18: mod_base = OTHER; note = 2'-O-methylguanosine-3'-phosphate
  modified_base 19: mod_base = OTHER; note = 2'-O-methylguanosine-3'-phosphate
  modified_base 20: mod_base = OTHER; note = 2'-O-methyluridine-3'-phosphate
  modified_base 21: mod_base = OTHER; note = 2'-O-methyluridine-3'-phosphorothioate
  modified_base 22: mod_base = OTHER; note = 2'-O-methylcytidine-3'-phosphorothioate
  modified_base 23: mod_base = OTHER; note = 2'-O-methyluridine
ttcatgaaatcaaagttggttct

SEQ ID NO: 1421 - RNA, 23 nt, synthetic construct
  source 1..23: mol_type = other RNA
  modified_base 1: mod_base = OTHER; note = 2'-O-methyluridine-3'-phosphorothioate 5'-(E)-Vinylphosphonate
  modified_base 2: mod_base = OTHER; note = 2'-deoxy-2'-fluorouridine-3'-phosphorothioate
  modified_base 3: mod_base = OTHER; note = 2'-O-methyluridine-3'-phosphate
  modified_base 4: mod_base = OTHER; note = 2'-O-methylcytidine-3'-phosphate
  modified_base 5: mod_base = OTHER; note = 2'-O-methyladenosine-3'-phosphate
  modified_base 6: mod_base = OTHER; note = 2'-deoxy-2'-fluoroguanosine-3'-phosphate
  modified_base 7: mod_base = OTHER; note = 2'-O-methylguanosine-3'-phosphate
  modified_base 8: mod_base = OTHER; note = 2'-deoxy-2'-fluoroadenosine-3'-phosphate
  modified_base 9: mod_base = OTHER; note = 2'-deoxy-2'-fluorouridine-3'-phosphate
  modified_base 10: mod_base = OTHER; note = 2'-O-methylcytidine-3'-phosphate
  modified_base 11: mod_base = OTHER; note = 2'-O-methyladenosine-3'-phosphate
  modified_base 12: mod_base = OTHER; note = 2'-O-methyluridine-3'-phosphate
  modified_base 13: mod_base = OTHER; note = 2'-O-methylguanosine-3'-phosphate
  modified_base 14: mod_base = OTHER; note = 2'-deoxy-2'-fluoroadenosine-3'-phosphate
  modified_base 15: mod_base = OTHER; note = 2'-O-methyladenosine-3'-phosphate
  modified_base 16: mod_base = OTHER; note = 2'-deoxy-2'-fluoroadenosine-3'-phosphate
  modified_base 17: mod_base = OTHER; note = 2'-O-methyluridine-3'-phosphate
  modified_base 18: mod_base = OTHER; note = 2'-O-methylcytidine-3'-phosphate
  modified_base 19: mod_base = OTHER; note = 2'-O-methyladenosine-3'-phosphate
  modified_base 20: mod_base = OTHER; note = 2'-O-methyladenosine-3'-phosphate
  modified_base 21: mod_base = OTHER; note = 2'-O-methyladenosine-3'-phosphorothioate
  modified_base 22: mod_base = OTHER; note = 2'-O-methylguanosine-3'-phosphorothioate
  modified_base 23: mod_base = OTHER; note = 2'-O-methyluridine
tttcaggatcatgaaatcaaagt

SEQ ID NO: 1422 - RNA, 23 nt, synthetic construct
  source 1..23: mol_type = other RNA
  modified_base 1: mod_base = OTHER; note = 2'-O-methyluridine-3'-phosphorothioate 5'-(E)-Vinylphosphonate
  modified_base 2: mod_base = OTHER; note = 2'-deoxy-2'-fluoroguanosine-3'-phosphorothioate
  modified_base 3: mod_base = OTHER; note = 2'-O-methyladenosine-3'-phosphate
  modified_base 4: mod_base = OTHER; note = 2'-O-methylcytidine-3'-phosphate
  modified_base 5: mod_base = OTHER; note = 2'-O-methyladenosine-3'-phosphate
  modified_base 6: mod_base = OTHER; note = 2'-deoxy-2'-fluoroguanosine-3'-phosphate
  modified_base 7: mod_base = OTHER; note = 2'-O-methylguanosine-3'-phosphate
  modified_base 8: mod_base = OTHER; note = 2'-deoxy-2'-fluorouridine-3'-phosphate
  modified_base 9: mod_base = OTHER; note = 2'-deoxy-2'-fluorouridine-3'-phosphate
  modified_base 10: mod_base = OTHER; note = 2'-O-methylcytidine-3'-phosphate
  modified_base 11: mod_base = OTHER; note = 2'-O-methyladenosine-3'-phosphate
  modified_base 12: mod_base = OTHER; note = 2'-O-methylguanosine-3'-phosphate
  modified_base 13: mod_base = OTHER; note = 2'-O-methylguanosine-3'-phosphate
  modified_base 14: mod_base = OTHER; note = 2'-deoxy-2'-fluoroadenosine-3'-phosphate
  modified_base 15: mod_base = OTHER; note = 2'-O-methyluridine-3'-phosphate
  modified_base 16: mod_base = OTHER; note = 2'-deoxy-2'-fluorocytidine-3'-phosphate
  modified_base 17: mod_base = OTHER; note = 2'-O-methyladenosine-3'-phosphate
  modified_base 18: mod_base = OTHER; note = 2'-O-methyluridine-3'-phosphate
  modified_base 19: mod_base = OTHER; note = 2'-O-methylguanosine-3'-phosphate
  modified_base 20: mod_base = OTHER; note = 2'-O-methyladenosine-3'-phosphate
  modified_base 21: mod_base = OTHER; note = 2'-O-methyladenosine-3'-phosphorothioate
  modified_base 22: mod_base = OTHER; note = 2'-O-methyladenosine-3'-phosphorothioate
  modified_base 23: mod_base = OTHER; note = 2'-O-methyluridine
tgacaggttcaggatcatgaaat

SEQ ID NO: 1423 - RNA, 23 nt, synthetic construct
  source 1..23: mol_type = other RNA
  modified_base 1: mod_base = OTHER; note = 2'-O-methyluridine-3'-phosphorothioate 5'-(E)-Vinylphosphonate
  modified_base 2: mod_base = OTHER; note = 2'-deoxy-2'-fluoroadenosine-3'-phosphorothioate
  modified_base 3: mod_base = OTHER; note = 2'-O-methylguanosine-3'-phosphate
  modified_base 4: mod_base = OTHER; note = 2'-O-methyladenosine-3'-phosphate
  modified_base 5: mod_base = OTHER; note = 2'-O-methyladenosine-3'-phosphate
  modified_base 6: mod_base = OTHER; note = 2'-deoxy-2'-fluoroguanosine-3'-phosphate
  modified_base 7: mod_base = OTHER; note = 2'-O-methylguanosine-3'-phosphate
  modified_base 8: mod_base = OTHER; note = 2'-deoxy-2'-fluoroadenosine-3'-phosphate
  modified_base 9: mod_base = OTHER; note = 2'-deoxy-2'-fluorocytidine-3'-phosphate
  modified_base 10: mod_base = OTHER; note = 2'-O-methyladenosine-3'-phosphate
  modified_base 11: mod_base = OTHER; note = 2'-O-methylguanosine-3'-phosphate
  modified_base 12: mod_base = OTHER; note = 2'-O-methylguanosine-3'-phosphate
  modified_base 13: mod_base = OTHER; note = 2'-O-methyluridine-3'-phosphate
  modified_base 14: mod_base = OTHER; note = 2'-deoxy-2'-fluorouridine-3'-phosphate
  modified_base 15: mod_base = OTHER; note = 2'-O-methylcytidine-3'-phosphate
  modified_base 16: mod_base = OTHER; note = 2'-deoxy-2'-fluoroadenosine-3'-phosphate
  modified_base 17: mod_base = OTHER; note = 2'-O-methylguanosine-3'-phosphate
  modified_base 18: mod_base = OTHER; note = 2'-O-methylguanosine-3'-phosphate
  modified_base 19: mod_base = OTHER; note = 2'-O-methyladenosine-3'-phosphate
  modified_base 20: mod_base = OTHER; note = 2'-O-methyluridine-3'-phosphate
  modified_base 21: mod_base = OTHER; note = 2'-O-methylcytidine-3'-phosphorothioate
  modified_base 22: mod_base = OTHER; note = 2'-O-methyladenosine-3'-phosphorothioate
  modified_base 23: mod_base = OTHER; note = 2'-O-methyluridine
tagaaggacaggttcaggatcat

SEQ ID NO: 1424 - RNA, 23 nt, synthetic construct
  source 1..23: mol_type = other RNA
  modified_base 1: mod_base = OTHER; note = 2'-O-methyluridine-3'-phosphorothioate 5'-(E)-Vinylphosphonate
  modified_base 2: mod_base = OTHER; note = 2'-deoxy-2'-fluoroguanosine-3'-phosphorothioate
  modified_base 3: mod_base = OTHER; note = 2'-O-methylguanosine-3'-phosphate
  modified_base 4: mod_base = OTHER; note = 2'-O-methyluridine-3'-phosphate
  modified_base 5: mod_base = OTHER; note = 2'-O-methylcytidine-3'-phosphate
  modified_base 6: mod_base = OTHER; note = 2'-deoxy-2'-fluoroadenosine-3'-phosphate
  modified_base 7: mod_base = OTHER; note = 2'-O-methylcytidine-3'-phosphate
  modified_base 8: mod_base = OTHER; note = 2'-deoxy-2'-fluoroadenosine-3'-phosphate
  modified_base 9: mod_base = OTHER; note = 2'-deoxy-2'-fluoroguanosine-3'-phosphate
  modified_base 10: mod_base = OTHER; note = 2'-O-methyladenosine-3'-phosphate
  modified_base 11: mod_base = OTHER; note = 2'-O-methyladenosine-3'-phosphate
  modified_base 12: mod_base = OTHER; note = 2'-O-methylguanosine-3'-phosphate
  modified_base 13: mod_base = OTHER; note = 2'-O-methylguanosine-3'-phosphate
  modified_base 14: mod_base = OTHER; note = 2'-deoxy-2'-fluoroadenosine-3'-phosphate
  modified_base 15: mod_base = OTHER; note = 2'-O-methylcytidine-3'-phosphate
  modified_base 16: mod_base = OTHER; note = 2'-deoxy-2'-fluoroadenosine-3'-phosphate
  modified_base 17: mod_base = OTHER; note = 2'-O-methylguanosine-3'-phosphate
  modified_base 18: mod_base = OTHER; note = 2'-O-methylguanosine-3'-phosphate
  modified_base 19: mod_base = OTHER; note = 2'-O-methyluridine-3'-phosphate
  modified_base 20: mod_base = OTHER; note = 2'-O-methyluridine-3'-phosphate
  modified_base 21: mod_base = OTHER; note = 2'-O-methylcytidine-3'-phosphorothioate
  modified_base 22: mod_base = OTHER; note = 2'-O-methyladenosine-3'-phosphorothioate
  modified_base 23: mod_base = OTHER; note = 2'-O-methylguanosine
tggtcacagaaggacaggttcag

SEQ ID NO: 1425 - RNA, 23 nt, synthetic construct
  source 1..23: mol_type = other RNA
  modified_base 1: mod_base = OTHER; note = 2'-O-methyluridine-3'-phosphorothioate 5'-(E)-Vinylphosphonate
  modified_base 2: mod_base = OTHER; note = 2'-deoxy-2'-fluoroguanosine-3'-phosphorothioate
  modified_base 3: mod_base = OTHER; note = 2'-O-methyladenosine-3'-phosphate
  modified_base 4: mod_base = OTHER; note = 2'-O-methyladenosine-3'-phosphate
  modified_base 5: mod_base = OTHER; note = 2'-O-methylguanosine-3'-phosphate
  modified_base 6: mod_base = OTHER; note = 2'-deoxy-2'-fluoroadenosine-3'-phosphate
  modified_base 7: mod_base = OTHER; note = 2'-O-methylguanosine-3'-phosphate
  modified_base 8: mod_base = OTHER; note = 2'-deoxy-2'-fluoroguanosine-3'-phosphate
  modified_base 9: mod_base = OTHER; note = 2'-deoxy-2'-fluorouridine-3'-phosphate
  modified_base 10: mod_base = OTHER; note = 2'-O-methylcytidine-3'-phosphate
  modified_base 11: mod_base = OTHER; note = 2'-O-methyladenosine-3'-phosphate
  modified_base 12: mod_base = OTHER; note = 2'-O-methylcytidine-3'-phosphate
  modified_base 13: mod_base = OTHER; note = 2'-O-methyladenosine-3'-phosphate
  modified_base 14: mod_base = OTHER; note = 2'-deoxy-2'-fluoroguanosine-3'-phosphate
  modified_base 15: mod_base = OTHER; note = 2'-O-methyladenosine-3'-phosphate
  modified_base 16: mod_base = OTHER; note = 2'-deoxy-2'-fluoroadenosine-3'-phosphate
  modified_base 17: mod_base = OTHER; note = 2'-O-methylguanosine-3'-phosphate
  modified_base 18: mod_base = OTHER; note = 2'-O-methylguanosine-3'-phosphate
  modified_base 19: mod_base = OTHER; note = 2'-O-methyladenosine-3'-phosphate
  modified_base 20: mod_base = OTHER; note = 2'-O-methylcytidine-3'-phosphate
  modified_base 21: mod_base = OTHER; note = 2'-O-methyladenosine-3'-phosphorothioate
  modified_base 22: mod_base = OTHER; note = 2'-O-methylguanosine-3'-phosphorothioate
  modified_base 23: mod_base = OTHER; note = 2'-O-methylguanosine
tgaagaggtcacagaaggacagg

SEQ ID NO: 1426 - RNA, 23 nt, synthetic construct
  source 1..23: mol_type = other RNA
  modified_base 1: mod_base = OTHER; note = 2'-O-methyluridine-3'-phosphorothioate 5'-(E)-Vinylphosphonate
  modified_base 2: mod_base = OTHER; note = 2'-deoxy-2'-fluorocytidine-3'-phosphorothioate
  modified_base 3: mod_base = OTHER; note = 2'-O-methyladenosine-3'-phosphate
  modified_base 4: mod_base = OTHER; note = 2'-O-methyladenosine-3'-phosphate
  modified_base 5: mod_base = OTHER; note = 2'-O-methyladenosine-3'-phosphate
  modified_base 6: mod_base = OTHER; note = 2'-deoxy-2'-fluorouridine-3'-phosphate
  modified_base 7: mod_base = OTHER; note = 2'-O-methylguanosine-3'-phosphate
  modified_base 8: mod_base = OTHER; note = 2'-deoxy-2'-fluoroadenosine-3'-phosphate
  modified_base 9: mod_base = OTHER; note = 2'-deoxy-2'-fluoroadenosine-3'-phosphate
  modified_base 10: mod_base = OTHER; note = 2'-O-methylguanosine-3'-phosphate
  modified_base 11: mod_base = OTHER; note = 2'-O-methyladenosine-3'-phosphate
  modified_base 12: mod_base = OTHER; note = 2'-O-methylguanosine-3'-phosphate
  modified_base 13: mod_base = OTHER; note = 2'-O-methylguanosine-3'-phosphate
  modified_base 14: mod_base = OTHER; note = 2'-deoxy-2'-fluorouridine-3'-phosphate
  modified_base 15: mod_base = OTHER; note = 2'-O-methylcytidine-3'-phosphate
  modified_base 16: mod_base = OTHER; note = 2'-deoxy-2'-fluoroadenosine-3'-phosphate
  modified_base 17: mod_base = OTHER; note = 2'-O-methylcytidine-3'-phosphate
  modified_base 18: mod_base = OTHER; note = 2'-O-methyladenosine-3'-phosphate
  modified_base 19: mod_base = OTHER; note = 2'-O-methylguanosine-3'-phosphate
  modified_base 20: mod_base = OTHER; note = 2'-O-methyladenosine-3'-phosphate
  modified_base 21: mod_base = OTHER; note = 2'-O-methyladenosine-3'-phosphorothioate
  modified_base 22: mod_base = OTHER; note = 2'-O-methylguanosine-3'-phosphorothioate
  modified_base 23: mod_base = OTHER; note = 2'-O-methylguanosine
tcaaatgaagaggtcacagaagg

SEQ ID NO: 1427 - RNA, 23 nt, synthetic construct
  source 1..23: mol_type = other RNA
  modified_base 1: mod_base = OTHER; note = 2'-O-methyluridine-3'-phosphorothioate 5'-(E)-Vinylphosphonate
  modified_base 2: mod_base = OTHER; note = 2'-deoxy-2'-fluoroadenosine-3'-phosphorothioate
  modified_base 3: mod_base = OTHER; note = 2'-O-methylcytidine-3'-phosphate
  modified_base 4: mod_base = OTHER; note = 2'-O-methyluridine-3'-phosphate
  modified_base 5: mod_base = OTHER; note = 2'-O-methylcytidine-3'-phosphate
  modified_base 6: mod_base = OTHER; note = 2'-deoxy-2'-fluorocytidine-3'-phosphate
  modified_base 7: mod_base = OTHER; note = 2'-O-methyladenosine-3'-phosphate
  modified_base 8: mod_base = OTHER; note = 2'-deoxy-2'-fluorocytidine-3'-phosphate
  modified_base 9: mod_base = OTHER; note = 2'-deoxy-2'-fluoroadenosine-3'-phosphate
  modified_base 10: mod_base = OTHER; note = 2'-O-methyladenosine-3'-phosphate
  modified_base 11: mod_base = OTHER; note = 2'-O-methyladenosine-3'-phosphate
  modified_base 12: mod_base = OTHER; note = 2'-O-methyluridine-3'-phosphate
  modified_base 13: mod_base = OTHER; note = 2'-O-methylguanosine-3'-phosphate
  modified_base 14: mod_base = OTHER; note = 2'-deoxy-2'-fluoroadenosine-3'-phosphate
  modified_base 15: mod_base = OTHER; note = 2'-O-methyladenosine-3'-phosphate
  modified_base 16: mod_base = OTHER; note = 2'-deoxy-2'-fluoroguanosine-3'-phosphate
  modified_base 17: mod_base = OTHER; note = 2'-O-methyladenosine-3'-phosphate
  modified_base 18: mod_base = OTHER; note = 2'-O-methylguanosine-3'-phosphate
  modified_base 19: mod_base = OTHER; note = 2'-O-methylguanosine-3'-phosphate
  modified_base 20: mod_base = OTHER; note = 2'-O-methyluridine-3'-phosphate
  modified_base 21: mod_base = OTHER; note = 2'-O-methylcytidine-3'-phosphorothioate
  modified_base 22: mod_base = OTHER; note = 2'-O-methyladenosine-3'-phosphorothioate
  modified_base 23: mod_base = OTHER; note = 2'-O-methylcytidine
tactccacaaatgaagaggtcac

SEQ ID NO: 1428 - RNA, 23 nt, synthetic construct
  source 1..23: mol_type = other RNA
  modified_base 1: mod_base = OTHER; note = 2'-O-methyluridine-3'-phosphorothioate 5'-(E)-Vinylphosphonate
  modified_base 2: mod_base = OTHER; note = 2'-deoxy-2'-fluorocytidine-3'-phosphorothioate
  modified_base 3: mod_base = OTHER; note = 2'-O-methyluridine-3'-phosphate
  modified_base 4: mod_base = OTHER; note = 2'-O-methylguanosine-3'-phosphate
  modified_base 5: mod_base = OTHER; note = 2'-O-methyluridine-3'-phosphate
  modified_base 6: mod_base = OTHER; note = 2'-deoxy-2'-fluorocytidine-3'-phosphate
  modified_base 7: mod_base = OTHER; note = 2'-O-methyladenosine-3'-phosphate
  modified_base 8: mod_base = OTHER; note = 2'-deoxy-2'-fluorocytidine-3'-phosphate
  modified_base 9: mod_base = OTHER; note = 2'-deoxy-2'-fluorouridine-3'-phosphate
  modified_base 10: mod_base = OTHER; note = 2'-O-methylcytidine-3'-phosphate
  modified_base 11: mod_base = OTHER; note = 2'-O-methylcytidine-3'-phosphate
  modified_base 12: mod_base = OTHER; note = 2'-O-methyladenosine-3'-phosphate
  modified_base 13: mod_base = OTHER; note = 2'-O-methylcytidine-3'-phosphate
  modified_base 14: mod_base = OTHER; note = 2'-deoxy-2'-fluoroadenosine-3'-phosphate
  modified_base 15: mod_base = OTHER; note = 2'-O-methyladenosine-3'-phosphate
  modified_base 16: mod_base = OTHER; note = 2'-deoxy-2'-fluoroadenosine-3'-phosphate
  modified_base 17: mod_base = OTHER; note = 2'-O-methyluridine-3'-phosphate
  modified_base 18: mod_base = OTHER; note = 2'-O-methylguanosine-3'-phosphate
  modified_base 19: mod_base = OTHER; note = 2'-O-methyladenosine-3'-phosphate
  modified_base 20: mod_base = OTHER; note = 2'-O-methyladenosine-3'-phosphate
  modified_base 21: mod_base = OTHER; note = 2'-O-methylguanosine-3'-phosphorothioate
  modified_base 22: mod_base = OTHER; note = 2'-O-methyladenosine-3'-phosphorothioate
  modified_base 23: mod_base = OTHER; note = 2'-O-methylguanosine
tctgtcactccacaaatgaagag

SEQ ID NO: 1429 - RNA, 23 nt, synthetic construct
  source 1..23: mol_type = other RNA
  modified_base 1: mod_base = OTHER; note = 2'-O-methyluridine-3'-phosphorothioate 5'-(E)-Vinylphosphonate
  modified_base 2: mod_base = OTHER; note = 2'-deoxy-2'-fluoroadenosine-3'-phosphorothioate
  modified_base 3: mod_base = OTHER; note = 2'-O-methyluridine-3'-phosphate
  modified_base 4: mod_base = OTHER; note = 2'-O-methyladenosine-3'-phosphate
  modified_base 5: mod_base = OTHER; note = 2'-O-methyladenosine-3'-phosphate
  modified_base 6: mod_base = OTHER; note = 2'-deoxy-2'-fluorocytidine-3'-phosphate
  modified_base 7: mod_base = OTHER; note = 2'-O-methyladenosine-3'-phosphate
  modified_base 8: mod_base = OTHER; note = 2'-deoxy-2'-fluorocytidine-3'-phosphate
  modified_base 9: mod_base = OTHER; note = 2'-deoxy-2'-fluoroadenosine-3'-phosphate
  modified_base 10: mod_base = OTHER; note = 2'-O-methyladenosine-3'-phosphate
  modified_base 11: mod_base = OTHER; note = 2'-O-methyladenosine-3'-phosphate
  modified_base 12: mod_base = OTHER; note = 2'-O-methylguanosine-3'-phosphate
  modified_base 13: mod_base = OTHER; note = 2'-O-methylguanosine-3'-phosphate
  modified_base 14: mod_base = OTHER; note = 2'-deoxy-2'-fluorouridine-3'-phosphate
  modified_base 15: mod_base = OTHER; note = 2'-O-methylguanosine-3'-phosphate
  modified_base 16: mod_base = OTHER; note = 2'-deoxy-2'-fluoroadenosine-3'-phosphate
  modified_base 17: mod_base = OTHER; note = 2'-O-methyladenosine-3'-phosphate
  modified_base 18: mod_base = OTHER; note = 2'-O-methylcytidine-3'-phosphate
  modified_base 19: mod_base = OTHER; note = 2'-O-methyladenosine-3'-phosphate
  modified_base 20: mod_base = OTHER; note = 2'-O-methyluridine-3'-phosphate
  modified_base 21: mod_base = OTHER; note = 2'-O-methylguanosine-3'-phosphorothioate
  modified_base 22: mod_base = OTHER; note = 2'-O-methylguanosine-3'-phosphorothioate
  modified_base 23: mod_base = OTHER; note = 2'-O-methylguanosine
tataacacaaaggtgaacatggg

SEQ ID NO: 1430 - RNA, 23 nt, synthetic construct
  source 1..23: mol_type = other RNA
  modified_base 1: mod_base = OTHER; note = 2'-O-methyluridine-3'-phosphorothioate 5'-(E)-Vinylphosphonate
  modified_base 2: mod_base = OTHER; note = 2'-deoxy-2'-fluoroguanosine-3'-phosphorothioate
  modified_base 3: mod_base = OTHER; note = 2'-O-methyladenosine-3'-phosphate
  modified_base 4: mod_base = OTHER; note = 2'-O-methyladenosine-3'-phosphate
  modified_base 5: mod_base = OTHER; note = 2'-O-methylguanosine-3'-phosphate
  modified_base 6: mod_base = OTHER; note = 2'-deoxy-2'-fluoroadenosine-3'-phosphate
  modified_base 7: mod_base = OTHER; note = 2'-O-methyladenosine-3'-phosphate
  modified_base 8: mod_base = OTHER; note = 2'-deoxy-2'-fluorouridine-3'-phosphate
  modified_base 9: mod_base = OTHER; note = 2'-deoxy-2'-fluoroadenosine-3'-phosphate
  modified_base 10: mod_base = OTHER; note = 2'-O-methyladenosine-3'-phosphate
  modified_base 11: mod_base = OTHER; note = 2'-O-methylcytidine-3'-phosphate
  modified_base 12: mod_base = OTHER; note = 2'-O-methyladenosine-3'-phosphate
  modified_base 13: mod_base = OTHER; note = 2'-O-methylcytidine-3'-phosphate
  modified_base 14: mod_base = OTHER; note = 2'-deoxy-2'-fluoroadenosine-3'-phosphate
  modified_base 15: mod_base = OTHER; note = 2'-O-methyladenosine-3'-phosphate
  modified_base 16: mod_base = OTHER; note = 2'-deoxy-2'-fluoroadenosine-3'-phosphate
  modified_base 17: mod_base = OTHER; note = 2'-O-methylguanosine-3'-phosphate
  modified_base 18: mod_base = OTHER; note = 2'-O-methylguanosine-3'-phosphate
  modified_base 19: mod_base = OTHER; note = 2'-O-methyluridine-3'-phosphate
  modified_base 20: mod_base = OTHER; note = 2'-O-methylguanosine-3'-phosphate
  modified_base 21: mod_base = OTHER; note = 2'-O-methyladenosine-3'-phosphorothioate
  modified_base 22: mod_base = OTHER; note = 2'-O-methyladenosine-3'-phosphorothioate
  modified_base 23: mod_base = OTHER; note = 2'-O-methylcytidine
tgaagaataacacaaaggtgaac

SEQ ID NO: 1431 - RNA, 23 nt, synthetic construct
  source 1..23: mol_type = other RNA
  modified_base 1: mod_base = OTHER; note = 2'-O-methyluridine-3'-phosphorothioate 5'-(E)-Vinylphosphonate
  modified_base 2: mod_base = OTHER; note = 2'-deoxy-2'-fluoroguanosine-3'-phosphorothioate
  modified_base 3: mod_base = OTHER; note = 2'-O-methyladenosine-3'-phosphate
  modified_base 4: mod_base = OTHER; note = 2'-O-methylguanosine-3'-phosphate
  modified_base 5: mod_base = OTHER; note = 2'-O-methylcytidine-3'-phosphate
  modified_base 6: mod_base = OTHER; note = 2'-deoxy-2'-fluorouridine-3'-phosphate
  modified_base 7: mod_base = OTHER; note = 2'-O-methylguanosine-3'-phosphate
  modified_base 8: mod_base = OTHER; note = 2'-deoxy-2'-fluoroadenosine-3'-phosphate
  modified_base 9: mod_base = OTHER; note = 2'-deoxy-2'-fluoroadenosine-3'-phosphate
  modified_base 10: mod_base = OTHER; note = 2'-O-methylguanosine-3'-phosphate
  modified_base 11: mod_base = OTHER; note = 2'-O-methyladenosine-3'-phosphate
  modified_base 12: mod_base = OTHER; note = 2'-O-methyladenosine-3'-phosphate
  modified_base 13: mod_base = OTHER; note = 2'-O-methyluridine-3'-phosphate
  modified_base 14: mod_base = OTHER; note = 2'-deoxy-2'-fluoroadenosine-3'-phosphate
  modified_base 15: mod_base = OTHER; note = 2'-O-methyladenosine-3'-phosphate
  modified_base 16: mod_base = OTHER; note = 2'-deoxy-2'-fluorocytidine-3'-phosphate
  modified_base 17: mod_base = OTHER; note = 2'-O-methyladenosine-3'-phosphate
  modified_base 18: mod_base = OTHER; note = 2'-O-methylcytidine-3'-phosphate
  modified_base 19: mod_base = OTHER; note = 2'-O-methyladenosine-3'-phosphate
  modified_base 20: mod_base = OTHER; note = 2'-O-methyladenosine-3'-phosphate
  modified_base 21: mod_base = OTHER; note = 2'-O-methyladenosine-3'-phosphorothioate
  modified_base 22: mod_base = OTHER; note = 2'-O-methylguanosine-3'-phosphorothioate
  modified_base 23: mod_base = OTHER; note = 2'-O-methylguanosine
tgagctgaagaataacacaaagg

SEQ ID NO: 1432 - RNA, 23 nt, synthetic construct
  source 1..23: mol_type = other RNA
  modified_base 1: mod_base = OTHER; note = 2'-O-methyluridine-3'-phosphorothioate 5'-(E)-Vinylphosphonate
  modified_base 2: mod_base = OTHER; note = 2'-deoxy-2'-fluorouridine-3'-phosphorothioate
  modified_base 3: mod_base = OTHER; note = 2'-O-methylguanosine-3'-phosphate
  modified_base 4: mod_base = OTHER; note = 2'-O-methylguanosine-3'-phosphate
  modified_base 5: mod_base = OTHER; note = 2'-O-methylcytidine-3'-phosphate
  modified_base 6: mod_base = OTHER; note = 2'-deoxy-2'-fluorouridine-3'-phosphate
  modified_base 7: mod_base = OTHER; note = 2'-O-methylguanosine-3'-phosphate
  modified_base 8: mod_base = OTHER; note = 2'-deoxy-2'-fluoroadenosine-3'-phosphate
  modified_base 9: mod_base = OTHER; note = 2'-deoxy-2'-fluoroguanosine-3'-phosphate
  modified_base 10: mod_base = OTHER; note = 2'-O-methylcytidine-3'-phosphate
  modified_base 11: mod_base = OTHER; note = 2'-O-methyluridine-3'-phosphate
  modified_base 12: mod_base = OTHER; note = 2'-O-methylguanosine-3'-phosphate
  modified_base 13: mod_base = OTHER; note = 2'-O-methyladenosine-3'-phosphate
  modified_base 14: mod_base = OTHER; note = 2'-deoxy-2'-fluoroadenosine-3'-phosphate
  modified_base 15: mod_base = OTHER; note = 2'-O-methylguanosine-3'-phosphate
  modified_base 16: mod_base = OTHER; note = 2'-deoxy-2'-fluoroadenosine-3'-phosphate
  modified_base 17: mod_base = OTHER; note = 2'-O-methyladenosine-3'-phosphate
  modified_base 18: mod_base = OTHER; note = 2'-O-methyluridine-3'-phosphate
  modified_base 19: mod_base = OTHER; note = 2'-O-methyladenosine-3'-phosphate
  modified_base 20: mod_base = OTHER; note = 2'-O-methyladenosine-3'-phosphate
  modified_base 21: mod_base = OTHER; note = 2'-O-methylcytidine-3'-phosphorothioate
  modified_base 22: mod_base = OTHER; note = 2'-O-methyladenosine-3'-phosphorothioate
  modified_base 23: mod_base = OTHER; note = 2'-O-methylcytidine
ttggctgagctgaagaataacac

SEQ ID NO: 1433 - RNA, 23 nt, synthetic construct
  source 1..23: mol_type = other RNA
  modified_base 1: mod_base = OTHER; note = 2'-O-methyluridine-3'-phosphorothioate 5'-(E)-Vinylphosphonate
  modified_base 2: mod_base = OTHER; note = 2'-deoxy-2'-fluoroguanosine-3'-phosphorothioate
  modified_base 3: mod_base = OTHER; note = 2'-O-methylguanosine-3'-phosphate
  modified_base 4: mod_base = OTHER; note = 2'-O-methyladenosine-3'-phosphate
  modified_base 5: mod_base = OTHER; note = 2'-O-methyluridine-3'-phosphate
  modified_base 6: mod_base = OTHER; note = 2'-deoxy-2'-fluoroadenosine-3'-phosphate
  modified_base 7: mod_base = OTHER; note = 2'-O-methylcytidine-3'-phosphate
  modified_base 8: mod_base = OTHER; note = 2'-deoxy-2'-fluorouridine-3'-phosphate
  modified_base 9: mod_base = OTHER; note = 2'-deoxy-2'-fluoroadenosine-3'-phosphate
  modified_base 10: mod_base = OTHER; note = 2'-O-methylcytidine-3'-phosphate
  modified_base 11: mod_base = OTHER; note = 2'-O-methyluridine-3'-phosphate
  modified_base 12: mod_base = OTHER; note = 2'-O-methylguanosine-3'-phosphate
  modified_base 13: mod_base = OTHER; note = 2'-O-methylguanosine-3'-phosphate
  modified_base 14: mod_base = OTHER; note = 2'-deoxy-2'-fluorocytidine-3'-phosphate
  modified_base 15: mod_base = OTHER; note = 2'-O-methyluridine-3'-phosphate
  modified_base 16: mod_base = OTHER; note = 2'-deoxy-2'-fluoroguanosine-3'-phosphate
  modified_base 17: mod_base = OTHER; note = 2'-O-methyladenosine-3'-phosphate
  modified_base 18: mod_base = OTHER; note = 2'-O-methylguanosine-3'-phosphate
  modified_base 19: mod_base = OTHER; note = 2'-O-methylcytidine-3'-phosphate
  modified_base 20: mod_base = OTHER; note = 2'-O-methyluridine-3'-phosphate
  modified_base 21: mod_base = OTHER; note = 2'-O-methylguanosine-3'-phosphorothioate
  modified_base 22: mod_base = OTHER; note = 2'-O-methyladenosine-3'-phosphorothioate
  modified_base 23: mod_base = OTHER; note = 2'-O-methyladenosine
tggatactactggctgagctgaa

SEQ ID NO: 1434 - RNA, 23 nt, synthetic construct
  source 1..23: mol_type = other RNA
  modified_base 1: mod_base = OTHER; note = 2'-O-methyluridine-3'-phosphorothioate 5'-(E)-Vinylphosphonate
  modified_base 2: mod_base = OTHER; note = 2'-deoxy-2'-fluoroadenosine-3'-phosphorothioate
  modified_base 3: mod_base = OTHER; note = 2'-O-methyluridine-3'-phosphate
  modified_base 4: mod_base = OTHER; note = 2'-O-methylcytidine-3'-phosphate
  modified_base 5: mod_base = OTHER; note = 2'-O-methylcytidine-3'-phosphate
  modified_base 6: mod_base = OTHER; note = 2'-deoxy-2'-fluoroguanosine-3'-phosphate
  modified_base 7: mod_base = OTHER; note = 2'-O-methylguanosine-3'-phosphate
  modified_base 8: mod_base = OTHER; note = 2'-deoxy-2'-fluoroguanosine-3'-phosphate
  modified_base 9: mod_base = OTHER; note = 2'-deoxy-2'-fluoroadenosine-3'-phosphate
  modified_base 10: mod_base = OTHER; note = 2'-O-methyluridine-3'-phosphate
  modified_base 11: mod_base = OTHER; note = 2'-O-methyladenosine-3'-phosphate
  modified_base 12: mod_base = OTHER; note = 2'-O-methylcytidine-3'-phosphate
  modified_base 13: mod_base = OTHER; note = 2'-O-methyluridine-3'-phosphate
  modified_base 14: mod_base = OTHER; note = 2'-deoxy-2'-fluoroadenosine-3'-phosphate
  modified_base 15: mod_base = OTHER; note = 2'-O-methylcytidine-3'-phosphate
  modified_base 16: mod_base = OTHER; note = 2'-deoxy-2'-fluorouridine-3'-phosphate
  modified_base 17: mod_base = OTHER; note = 2'-O-methylguanosine-3'-phosphate
  modified_base 18: mod_base = OTHER; note = 2'-O-methylguanosine-3'-phosphate
  modified_base 19: mod_base = OTHER; note = 2'-O-methylcytidine-3'-phosphate
  modified_base 20: mod_base = OTHER; note = 2'-O-methyluridine-3'-phosphate
  modified_base 21: mod_base = OTHER; note = 2'-O-methylguanosine-3'-phosphorothioate
  modified_base 22: mod_base = OTHER; note = 2'-O-methyladenosine-3'-phosphorothioate
  modified_base 23: mod_base = OTHER; note = 2'-O-methylguanosine
tatccgggatactactggctgag

SEQ ID NO: 1435 - RNA, 23 nt, synthetic construct
  source 1..23: mol_type = other RNA
  modified_base 1: mod_base = OTHER; note = 2'-O-methyluridine-3'-phosphorothioate 5'-(E)-Vinylphosphonate
  modified_base 2: mod_base = OTHER; note = 2'-deoxy-2'-fluoroadenosine-3'-phosphorothioate
  modified_base 3: mod_base = OTHER; note = 2'-O-methylguanosine-3'-phosphate
  modified_base 4: mod_base = OTHER; note = 2'-O-methyladenosine-3'-phosphate
  modified_base 5: mod_base = OTHER; note = 2'-O-methyladenosine-3'-phosphate
  modified_base 6: mod_base = OTHER; note = 2'-deoxy-2'-fluoroadenosine-3'-phosphate
  modified_base 7: mod_base = OTHER; note = 2'-O-methylguanosine-3'-phosphate
  modified_base 8: mod_base = OTHER; note = 2'-deoxy-2'-fluorocytidine-3'-phosphate
  modified_base 9: mod_base = OTHER; note = 2'-deoxy-2'-fluoroadenosine-3'-phosphate
  modified_base 10: mod_base = OTHER; note = 2'-O-methyluridine-3'-phosphate
  modified_base 11: mod_base = OTHER; note = 2'-O-methylcytidine-3'-phosphate
  modified_base 12: mod_base = OTHER; note = 2'-O-methylcytidine-3'-phosphate
  modified_base 13: mod_base = OTHER; note = 2'-O-methylguanosine-3'-phosphate
  modified_base 14: mod_base = OTHER; note = 2'-deoxy-2'-fluoroguanosine-3'-phosphate
  modified_base 15: mod_base = OTHER; note = 2'-O-methylguanosine-3'-phosphate
  modified_base 16: mod_base = OTHER; note = 2'-deoxy-2'-fluoroadenosine-3'-phosphate
  modified_base 17: mod_base = OTHER; note = 2'-O-methyluridine-3'-phosphate
  modified_base 18: mod_base = OTHER; note = 2'-O-methyladenosine-3'-phosphate
  modified_base 19: mod_base = OTHER; note = 2'-O-methylcytidine-3'-phosphate
  modified_base 20: mod_base = OTHER; note = 2'-O-methyluridine-3'-phosphate
  modified_base 21: mod_base = OTHER; note = 2'-O-methyladenosine-3'-phosphorothioate
  modified_base 22: mod_base = OTHER; note = 2'-O-methylcytidine-3'-phosphorothioate
  modified_base 23: mod_base = OTHER; note = 2'-O-methyluridine
tagaaagcatccgggatactact

SEQ ID NO: 1436 - RNA, 23 nt, synthetic construct
  source 1..23: mol_type = other RNA
  modified_base 1: mod_base = OTHER; note = 2'-O-methyluridine-3'-phosphorothioate 5'-(E)-Vinylphosphonate
  modified_base 2: mod_base = OTHER; note = 2'-deoxy-2'-fluoroguanosine-3'-phosphorothioate
  modified_base 3: mod_base = OTHER; note = 2'-O-methyladenosine-3'-phosphate
  modified_base 4: mod_base = OTHER; note = 2'-O-methyladenosine-3'-phosphate
  modified_base 5: mod_base = OTHER; note = 2'-O-methylguanosine-3'-phosphate
  modified_base 6: mod_base = OTHER; note = 2'-deoxy-2'-fluorocytidine-3'-phosphate
  modified_base 7: mod_base = OTHER; note = 2'-O-methyladenosine-3'-phosphate
  modified_base 8: mod_base = OTHER; note = 2'-deoxy-2'-fluoroguanosine-3'-phosphate
  modified_base 9: mod_base = OTHER; note = 2'-deoxy-2'-fluoroadenosine-3'-phosphate
  modified_base 10: mod_base = OTHER; note = 2'-O-methyladenosine-3'-phosphate
  modified_base 11: mod_base = OTHER; note = 2'-O-methyladenosine-3'-phosphate
  modified_base 12: mod_base = OTHER; note = 2'-O-methylguanosine-3'-phosphate
  modified_base 13: mod_base = OTHER; note = 2'-O-methylcytidine-3'-phosphate
  modified_base 14: mod_base = OTHER; note = 2'-deoxy-2'-fluoroadenosine-3'-phosphate
  modified_base 15: mod_base = OTHER; note = 2'-O-methyluridine-3'-phosphate
  modified_base 16: mod_base = OTHER; note = 2'-deoxy-2'-fluorocytidine-3'-phosphate
  modified_base 17: mod_base = OTHER; note = 2'-O-methylcytidine-3'-phosphate
  modified_base 18: mod_base = OTHER; note = 2'-O-methylguanosine-3'-phosphate
  modified_base 19: mod_base = OTHER; note = 2'-O-methylguanosine-3'-phosphate
  modified_base 20: mod_base = OTHER; note = 2'-O-methylguanosine-3'-phosphate
  modified_base 21: mod_base = OTHER; note = 2'-O-methyladenosine-3'-phosphorothioate
  modified_base 22: mod_base = OTHER; note = 2'-O-methyluridine-3'-phosphorothioate
  modified_base 23: mod_base = OTHER; note = 2'-O-methyladenosine
tgaagcagaaagcatccgggata

SEQ ID NO: 1437 - RNA, 23 nt, synthetic construct
  source 1..23: mol_type = other RNA
  modified_base 1: mod_base = OTHER; note = 2'-O-methyluridine-3'-phosphorothioate 5'-(E)-Vinylphosphonate
  modified_base 2: mod_base = OTHER; note = 2'-deoxy-2'-fluoroadenosine-3'-phosphorothioate
  modified_base 3: mod_base = OTHER; note = 2'-O-methyladenosine-3'-phosphate
  modified_base 4: mod_base = OTHER; note = 2'-O-methyladenosine-3'-phosphate
  modified_base 5: mod_base = OTHER; note = 2'-O-methylguanosine-3'-phosphate
  modified_base 6: mod_base = OTHER; note = 2'-deoxy-2'-fluorouridine-3'-phosphate
  modified_base 7: mod_base = OTHER; note = 2'-O-methylguanosine-3'-phosphate
  modified_base 8: mod_base = OTHER; note = 2'-deoxy-2'-fluoroadenosine-3'-phosphate
  modified_base 9: mod_base = OTHER; note = 2'-deoxy-2'-fluoroadenosine-3'-phosphate
  modified_base 10: mod_base = OTHER; note = 2'-O-methylguanosine-3'-phosphate
  modified_base 11: mod_base = OTHER; note = 2'-O-methylcytidine-3'-phosphate
  modified_base 12: mod_base = OTHER; note = 2'-O-methyladenosine-3'-phosphate
  modified_base 13: mod_base = OTHER; note = 2'-O-methylguanosine-3'-phosphate
  modified_base 14: mod_base = OTHER; note = 2'-deoxy-2'-fluoroadenosine-3'-phosphate
  modified_base 15: mod_base = OTHER; note = 2'-O-methyladenosine-3'-phosphate
  modified_base 16: mod_base = OTHER; note = 2'-deoxy-2'-fluoroadenosine-3'-phosphate
  modified_base 17: mod_base = OTHER; note = 2'-O-methylguanosine-3'-phosphate
  modified_base 18: mod_base = OTHER; note = 2'-O-methylcytidine-3'-phosphate
  modified_base 19: mod_base = OTHER; note = 2'-O-methyladenosine-3'-phosphate
  modified_base 20: mod_base = OTHER; note = 2'-O-methyluridine-3'-phosphate
  modified_base 21: mod_base = OTHER; note = 2'-O-methylcytidine-3'-phosphorothioate
  modified_base 22: mod_base = OTHER; note = 2'-O-methylcytidine-3'-phosphorothioate
  modified_base 23: mod_base = OTHER; note = 2'-O-methylguanosine
taaagtgaagcagaaagcatccg

SEQ ID NO: 1438 - RNA, 23 nt, synthetic construct
  source 1..23: mol_type = other RNA
  modified_base 1: mod_base = OTHER; note = 2'-O-methyluridine-3'-phosphorothioate 5'-(E)-Vinylphosphonate
  modified_base 2: mod_base = OTHER; note = 2'-deoxy-2'-fluoroguanosine-3'-phosphorothioate
  modified_base 3: mod_base = OTHER; note = 2'-O-methyladenosine-3'-phosphate
  modified_base 4: mod_base = OTHER; note = 2'-O-methyluridine-3'-phosphate
  modified_base 5: mod_base = OTHER; note = 2'-O-methylguanosine-3'-phosphate
  modified_base 6: mod_base = OTHER; note = 2'-deoxy-2'-fluoroguanosine-3'-phosphate
  modified_base 7: mod_base = OTHER; note = 2'-O-methyladenosine-3'-phosphate
  modified_base 8: mod_base = OTHER; note = 2'-deoxy-2'-fluoroadenosine-3'-phosphate
  modified_base 9: mod_base = OTHER; note = 2'-deoxy-2'-fluoroadenosine-3'-phosphate
  modified_base 10: mod_base = OTHER; note = 2'-O-methylguanosine-3'-phosphate
  modified_base 11: mod_base = OTHER; note = 2'-O-methyluridine-3'-phosphate
  modified_base 12: mod_base = OTHER; note = 2'-O-methylguanosine-3'-phosphate
  modified_base 13: mod_base = OTHER; note = 2'-O-methyladenosine-3'-phosphate
  modified_base 14: mod_base = OTHER; note = 2'-deoxy-2'-fluoroadenosine-3'-phosphate
  modified_base 15: mod_base = OTHER; note = 2'-O-methylguanosine-3'-phosphate
  modified_base 16: mod_base = OTHER; note = 2'-deoxy-2'-fluorocytidine-3'-phosphate
  modified_base 17: mod_base = OTHER; note = 2'-O-methyladenosine-3'-phosphate
  modified_base 18: mod_base = OTHER; note = 2'-O-methylguanosine-3'-phosphate
  modified_base 19: mod_base = OTHER; note = 2'-O-methyladenosine-3'-phosphate
  modified_base 20: mod_base = OTHER; note = 2'-O-methyladenosine-3'-phosphate
  modified_base 21: mod_base = OTHER; note = 2'-O-methyladenosine-3'-phosphorothioate
  modified_base 22: mod_base = OTHER; note = 2'-O-methylguanosine-3'-phosphorothioate
  modified_base 23: mod_base = OTHER; note = 2'-O-methylcytidine
tgatggaaagtgaagcagaaagc

SEQ ID NO: 1439 - RNA, 23 nt, synthetic construct
  source 1..23: mol_type = other RNA
  modified_base 1: mod_base = OTHER; note = 2'-O-methyluridine-3'-phosphorothioate 5'-(E)-Vinylphosphonate
  modified_base 2: mod_base = OTHER; note = 2'-deoxy-2'-fluoroadenosine-3'-phosphorothioate
  modified_base 3: mod_base = OTHER; note = 2'-O-methyladenosine-3'-phosphate
  modified_base 4: mod_base = OTHER; note = 2'-O-methylcytidine-3'-phosphate
  modified_base 5: mod_base = OTHER; note = 2'-O-methyluridine-3'-phosphate
  modified_base 6: mod_base = OTHER; note = 2'-deoxy-2'-fluoroguanosine-3'-phosphate
  modified_base 7: mod_base = OTHER; note = 2'-O-methylguanosine-3'-phosphate
  modified_base 8: mod_base = OTHER; note = 2'-deoxy-2'-fluorouridine-3'-phosphate
  modified_base 9: mod_base = OTHER; note = 2'-deoxy-2'-fluoroguanosine-3'-phosphate
  modified_base 10: mod_base = OTHER; note = 2'-O-methyladenosine-3'-phosphate
  modified_base 11: mod_base = OTHER; note = 2'-O-methylguanosine-3'-phosphate
  modified_base 12: mod_base = OTHER; note = 2'-O-methyladenosine-3'-phosphate
  modified_base 13: mod_base = OTHER; note = 2'-O-methyluridine-3'-phosphate
  modified_base 14: mod_base = OTHER; note = 2'-deoxy-2'-fluoroguanosine-3'-phosphate
  modified_base 15: mod_base = OTHER; note = 2'-O-methylguanosine-3'-phosphate
  modified_base 16: mod_base = OTHER; note = 2'-deoxy-2'-fluoroadenosine-3'-phosphate
  modified_base 17: mod_base = OTHER; note = 2'-O-methyladenosine-3'-phosphate
  modified_base 18: mod_base = OTHER; note = 2'-O-methyladenosine-3'-phosphate
  modified_base 19: mod_base = OTHER; note = 2'-O-methylguanosine-3'-phosphate
  modified_base 20: mod_base = OTHER; note = 2'-O-methyluridine-3'-phosphate
  modified_base 21: mod_base = OTHER; note = 2'-O-methylguanosine-3'-phosphorothioate
  modified_base 22: mod_base = OTHER; note = 2'-O-methyladenosine-3'-phosphorothioate
  modified_base 23: mod_base = OTHER; note = 2'-O-methyladenosine
taactggtgagatggaaagtgaa

SEQ ID NO: 1440 - RNA, 23 nt, synthetic construct
  source 1..23: mol_type = other RNA
  modified_base 1: mod_base = OTHER; note = 2'-O-methyluridine-3'-phosphorothioate 5'-(E)-Vinylphosphonate
  modified_base 2: mod_base = OTHER; note = 2'-deoxy-2'-fluoroadenosine-3'-phosphorothioate
  modified_base 3: mod_base = OTHER; note = 2'-O-methylguanosine-3'-phosphate
  modified_base 4: mod_base = OTHER; note = 2'-O-methylcytidine-3'-phosphate
  modified_base 5: mod_base = OTHER; note = 2'-O-methylcytidine-3'-phosphate
  modified_base 6: mod_base = OTHER; note = 2'-deoxy-2'-fluorouridine-3'-phosphate
  modified_base 7: mod_base = OTHER; note = 2'-O-methylguanosine-3'-phosphate
  modified_base 8: mod_base = OTHER; note = 2'-deoxy-2'-fluoroadenosine-3'-phosphate
  modified_base 9: mod_base = OTHER; note = 2'-deoxy-2'-fluoroadenosine-3'-phosphate
  modified_base 10: mod_base = OTHER; note = 2'-O-methylcytidine-3'-phosphate
  modified_base 11: mod_base = OTHER; note = 2'-O-methyluridine-3'-phosphate
  modified_base 12: mod_base = OTHER; note = 2'-O-methylguanosine-3'-phosphate
  modified_base 13: mod_base = OTHER; note = 2'-O-methylguanosine-3'-phosphate
  modified_base 14: mod_base = OTHER; note = 2'-deoxy-2'-fluorouridine-3'-phosphate
  modified_base 15: mod_base = OTHER; note = 2'-O-methylguanosine-3'-phosphate
  modified_base 16: mod_base = OTHER; note = 2'-deoxy-2'-fluoroadenosine-3'-phosphate
  modified_base 17: mod_base = OTHER; note = 2'-O-methylguanosine-3'-phosphate
  modified_base 18: mod_base = OTHER; note = 2'-O-methyladenosine-3'-phosphate
  modified_base 19: mod_base = OTHER; note = 2'-O-methyluridine-3'-phosphate
  modified_base 20: mod_base = OTHER; note = 2'-O-methylguanosine-3'-phosphate
  modified_base 21: mod_base = OTHER; note = 2'-O-methylguanosine-3'-phosphorothioate
  modified_base 22: mod_base = OTHER; note = 2'-O-methyladenosine-3'-phosphorothioate
  modified_base 23: mod_base = OTHER; note = 2'-O-methyladenosine
tagcctgaactggtgagatggaa

SEQ ID NO: 1441 - RNA, 23 nt, synthetic construct
  source 1..23: mol_type = other RNA
  modified_base 1: mod_base = OTHER; note = 2'-O-methyluridine-3'-phosphorothioate 5'-(E)-Vinylphosphonate
  modified_base 2: mod_base = OTHER; note = 2'-deoxy-2'-fluoroguanosine-3'-phosphorothioate
  modified_base 3: mod_base = OTHER; note = 2'-O-methyladenosine-3'-phosphate
  modified_base 4: mod_base = OTHER; note = 2'-O-methyluridine-3'-phosphate
  modified_base 5: mod_base = OTHER; note = 2'-O-methylguanosine-3'-phosphate
  modified_base 6: mod_base = OTHER; note = 2'-deoxy-2'-fluoroadenosine-3'-phosphate
  modified_base 7: mod_base = OTHER; note = 2'-O-methyladenosine-3'-phosphate
  modified_base 8: mod_base = OTHER; note = 2'-deoxy-2'-fluoroguanosine-3'-phosphate
  modified_base 9: mod_base = OTHER; note = 2'-deoxy-2'-fluorocytidine-3'-phosphate
  modified_base 10: mod_base = OTHER; note = 2'-O-methylcytidine-3'-phosphate
  modified_base 11: mod_base = OTHER; note = 2'-O-methyluridine-3'-phosphate
  modified_base 12: mod_base = OTHER; note = 2'-O-methylguanosine-3'-phosphate
  modified_base 13: mod_base = OTHER; note = 2'-O-methyladenosine-3'-phosphate
  modified_base 14: mod_base = OTHER; note = 2'-deoxy-2'-fluoroadenosine-3'-phosphate
  modified_base 15: mod_base = OTHER; note = 2'-O-methylcytidine-3'-phosphate
  modified_base 16: mod_base = OTHER; note = 2'-deoxy-2'-fluorouridine-3'-phosphate
  modified_base 17: mod_base = OTHER; note = 2'-O-methylguanosine-3'-phosphate
  modified_base 18: mod_base = OTHER; note = 2'-O-methylguanosine-3'-phosphate
  modified_base 19: mod_base = OTHER; note = 2'-O-methyluridine-3'-phosphate
  modified_base 20: mod_base = OTHER; note = 2'-O-methylguanosine-3'-phosphate
  modified_base 21: mod_base = OTHER; note = 2'-O-methyladenosine-3'-phosphorothioate
  modified_base 22: mod_base = OTHER; note = 2'-O-methylguanosine-3'-phosphorothioate
  modified_base 23: mod_base = OTHER; note = 2'-O-methyladenosine
tgatgaagcctgaactggtgaga

SEQ ID NO: 1442 - RNA, 23 nt, synthetic construct
  source 1..23: mol_type = other RNA
  modified_base 1: mod_base = OTHER; note = 2'-O-methyluridine-3'-phosphorothioate 5'-(E)-Vinylphosphonate
  modified_base 2: mod_base = OTHER; note = 2'-deoxy-2'-fluoroadenosine-3'-phosphorothioate
  modified_base 3: mod_base = OTHER; note = 2'-O-methyluridine-3'-phosphate
  modified_base 4: mod_base = OTHER; note = 2'-O-methylguanosine-3'-phosphate
  modified_base 5: mod_base = OTHER; note = 2'-O-methyladenosine-3'-phosphate
  modified_base 6: mod_base = OTHER; note = 2'-deoxy-2'-fluorouridine-3'-phosphate
  modified_base 7: mod_base = OTHER; note = 2'-O-methylguanosine-3'-phosphate
  modified_base 8: mod_base = OTHER; note = 2'-deoxy-2'-fluoroadenosine-3'-phosphate
  modified_base 9: mod_base = OTHER; note = 2'-deoxy-2'-fluorouridine-3'-phosphate
  modified_base 10: mod_base = OTHER; note = 2'-O-methylguanosine-3'-phosphate
  modified_base 11: mod_base = OTHER; note = 2'-O-methyladenosine-3'-phosphate
  modified_base 12: mod_base = OTHER; note = 2'-O-methyladenosine-3'-phosphate
  modified_base 13: mod_base = OTHER; note = 2'-O-methylguanosine-3'-phosphate
  modified_base 14: mod_base = OTHER; note = 2'-deoxy-2'-fluorocytidine-3'-phosphate
  modified_base 15: mod_base = OTHER; note = 2'-O-methylcytidine-3'-phosphate
  modified_base 16: mod_base = OTHER; note = 2'-deoxy-2'-fluorouridine-3'-phosphate
  modified_base 17: mod_base = OTHER; note = 2'-O-methylguanosine-3'-phosphate
  modified_base 18: mod_base = OTHER; note = 2'-O-methyladenosine-3'-phosphate
  modified_base 19: mod_base = OTHER; note = 2'-O-methyladenosine-3'-phosphate
  modified_base 20: mod_base = OTHER; note = 2'-O-methylcytidine-3'-phosphate
  modified_base 21: mod_base = OTHER; note = 2'-O-methyluridine-3'-phosphorothioate
  modified_base 22: mod_base = OTHER; note = 2'-O-methylguanosine-3'-phosphorothioate
  modified_base 23: mod_base = OTHER; note = 2'-O-methylguanosine
tatgatgatgaagcctgaactgg

SEQ ID NO: 1443 - RNA, 23 nt, synthetic construct
  source 1..23: mol_type = other RNA
  modified_base 1: mod_base = OTHER; note = 2'-O-methyluridine-3'-phosphorothioate 5'-(E)-Vinylphosphonate
  modified_base 2: mod_base = OTHER; note = 2'-deoxy-2'-fluoroguanosine-3'-phosphorothioate
  modified_base 3: mod_base = OTHER; note = 2'-O-methyladenosine-3'-phosphate
  modified_base 4: mod_base = OTHER; note = 2'-O-methylguanosine-3'-phosphate
  modified_base 5: mod_base = OTHER; note = 2'-O-methyladenosine-3'-phosphate
  modified_base 6: mod_base = OTHER; note = 2'-deoxy-2'-fluorocytidine-3'-phosphate
  modified_base 7: mod_base = OTHER; note = 2'-O-methyladenosine-3'-phosphate
  modified_base 8: mod_base = OTHER; note = 2'-deoxy-2'-fluorouridine-3'-phosphate
  modified_base 9: mod_base = OTHER; note = 2'-deoxy-2'-fluoroguanosine-3'-phosphate
  modified_base 10: mod_base = OTHER; note = 2'-O-methyladenosine-3'-phosphate
  modified_base 11: mod_base = OTHER; note = 2'-O-methyluridine-3'-phosphate
  modified_base 12: mod_base = OTHER; note = 2'-O-methylguanosine-3'-phosphate
  modified_base 13: mod_base = OTHER; note = 2'-O-methyladenosine-3'-phosphate
  modified_base 14: mod_base = OTHER; note = 2'-deoxy-2'-fluorouridine-3'-phosphate
  modified_base 15: mod_base = OTHER; note = 2'-O-methylguanosine-3'-phosphate
  modified_base 16: mod_base = OTHER; note = 2'-deoxy-2'-fluoroadenosine-3'-phosphate
  modified_base 17: mod_base = OTHER; note = 2'-O-methyladenosine-3'-phosphate
  modified_base 18: mod_base = OTHER; note = 2'-O-methylguanosine-3'-phosphate
  modified_base 19: mod_base = OTHER; note = 2'-O-methylcytidine-3'-phosphate
  modified_base 20: mod_base = OTHER; note = 2'-O-methylcytidine-3'-phosphate
  modified_base 21: mod_base = OTHER; note = 2'-O-methyluridine-3'-phosphorothioate
  modified_base 22: mod_base = OTHER; note = 2'-O-methylguanosine-3'-phosphorothioate
  modified_base 23: mod_base = OTHER; note = 2'-O-methyladenosine
tgagacatgatgatgaagcctga

SEQ ID NO: 1444 - RNA, 23 nt, synthetic construct
  source 1..23: mol_type = other RNA
  modified_base 1: mod_base = OTHER; note = 2'-O-methyluridine-3'-phosphorothioate 5'-(E)-Vinylphosphonate
  modified_base 2: mod_base = OTHER; note = 2'-deoxy-2'-fluorocytidine-3'-phosphorothioate
  modified_base 3: mod_base = OTHER; note = 2'-O-methyluridine-3'-phosphate
  modified_base 4: mod_base = OTHER; note = 2'-O-methyluridine-3'-phosphate
  modified_base 5: mod_base = OTHER; note = 2'-O-methylcytidine-3'-phosphate
  modified_base 6: mod_base = OTHER; note = 2'-deoxy-2'-fluoroadenosine-3'-phosphate
  modified_base 7: mod_base = OTHER; note = 2'-O-methylguanosine-3'-phosphate
  modified_base 8: mod_base = OTHER; note = 2'-deoxy-2'-fluoroadenosine-3'-phosphate
  modified_base 9: mod_base = OTHER; note = 2'-deoxy-2'-fluoroguanosine-3'-phosphate
  modified_base 10: mod_base = OTHER; note = 2'-O-methyladenosine-3'-phosphate
  modified_base 11: mod_base = OTHER; note = 2'-O-methylcytidine-3'-phosphate
  modified_base 12: mod_base = OTHER; note = 2'-O-methyladenosine-3'-phosphate
  modified_base 13: mod_base = OTHER; note = 2'-O-methyluridine-3'-phosphate
  modified_base 14: mod_base = OTHER; note = 2'-deoxy-2'-fluoroguanosine-3'-phosphate
  modified_base 15: mod_base = OTHER; note = 2'-O-methyladenosine-3'-phosphate
  modified_base 16: mod_base = OTHER; note = 2'-deoxy-2'-fluorouridine-3'-phosphate
  modified_base 17: mod_base = OTHER; note = 2'-O-methylguanosine-3'-phosphate
  modified_base 18: mod_base = OTHER; note = 2'-O-methyladenosine-3'-phosphate
  modified_base 19: mod_base = OTHER; note = 2'-O-methyluridine-3'-phosphate
  modified_base 20: mod_base = OTHER; note = 2'-O-methylguanosine-3'-phosphate
  modified_base 21: mod_base = OTHER; note = 2'-O-methyladenosine-3'-phosphorothioate
  modified_base 22: mod_base = OTHER; note = 2'-O-methyladenosine-3'-phosphorothioate
  modified_base 23: mod_base = OTHER; note = 2'-O-methylguanosine
tcttcagagacatgatgatgaag

SEQ ID NO: 1445 - RNA, 23 nt, synthetic construct
  source 1..23: mol_type = other RNA
  modified_base 1: mod_base = OTHER; note = 2'-O-methyluridine-3'-phosphorothioate 5'-(E)-Vinylphosphonate
  modified_base 2: mod_base = OTHER; note = 2'-deoxy-2'-fluoroadenosine-3'-phosphorothioate
  modified_base 3: mod_base = OTHER; note = 2'-O-methylcytidine-3'-phosphate
  modified_base 4: mod_base = OTHER; note = 2'-O-methyluridine-3'-phosphate
  modified_base 5: mod_base = OTHER; note = 2'-O-methylguanosine-3'-phosphate
  modified_base 6: mod_base = OTHER; note = 2'-deoxy-2'-fluorouridine-3'-phosphate
  modified_base 7: mod_base = OTHER; note = 2'-O-methylcytidine-3'-phosphate
  modified_base 8: mod_base = OTHER; note = 2'-deoxy-2'-fluorouridine-3'-phosphate
  modified_base 9: mod_base = OTHER; note = 2'-deoxy-2'-fluorouridine-3'-phosphate
  modified_base 10: mod_base = OTHER; note = 2'-O-methylcytidine-3'-phosphate
  modified_base 11: mod_base = OTHER; note = 2'-O-methyladenosine-3'-phosphate
  modified_base 12: mod_base = OTHER; note = 2'-O-methylguanosine-3'-phosphate
  modified_base 13: mod_base = OTHER; note = 2'-O-methyladenosine-3'-phosphate
  modified_base 14: mod_base = OTHER; note = 2'-deoxy-2'-fluoroguanosine-3'-phosphate
  modified_base 15: mod_base = OTHER; note = 2'-O-methyladenosine-3'-phosphate
  modified_base 16: mod_base = OTHER; note = 2'-deoxy-2'-fluorocytidine-3'-phosphate
  modified_base 17: mod_base = OTHER; note = 2'-O-methyladenosine-3'-phosphate
  modified_base 18: mod_base = OTHER; note = 2'-O-methyluridine-3'-phosphate
  modified_base 19: mod_base = OTHER; note = 2'-O-methylguanosine-3'-phosphate
  modified_base 20: mod_base = OTHER; note = 2'-O-methyladenosine-3'-phosphate
  modified_base 21: mod_base = OTHER; note = 2'-O-methyluridine-3'-phosphorothioate
  modified_base 22: mod_base = OTHER; note = 2'-O-methylguanosine-3'-phosphorothioate
  modified_base 23: mod_base = OTHER; note = 2'-O-methyladenosine
tactgtcttcagagacatgatga

SEQ ID NO: 1446 - RNA, 23 nt, synthetic construct
  source 1..23: mol_type = other RNA
  modified_base 1: mod_base = OTHER; note = 2'-O-methyluridine-3'-phosphorothioate 5'-(E)-Vinylphosphonate
  modified_base 2: mod_base = OTHER; note = 2'-deoxy-2'-fluoroadenosine-3'-phosphorothioate
  modified_base 3: mod_base = OTHER; note = 2'-O-methylcytidine-3'-phosphate
  modified_base 4: mod_base = OTHER; note = 2'-O-methyluridine-3'-phosphate
  modified_base 5: mod_base = OTHER; note = 2'-O-methylguanosine-3'-phosphate
  modified_base 6: mod_base = OTHER; note = 2'-deoxy-2'-fluorocytidine-3'-phosphate
  modified_base 7: mod_base = OTHER; note = 2'-O-methylcytidine-3'-phosphate
  modified_base 8: mod_base = OTHER; note = 2'-deoxy-2'-fluoroadenosine-3'-phosphate
  modified_base 9: mod_base = OTHER; note = 2'-deoxy-2'-fluorocytidine-3'-phosphate
  modified_base 10: mod_base = OTHER; note = 2'-O-methyluridine-3'-phosphate
  modified_base 11: mod_base = OTHER; note = 2'-O-methylguanosine-3'-phosphate
  modified_base 12: mod_base = OTHER; note = 2'-O-methyluridine-3'-phosphate
  modified_base 13: mod_base = OTHER; note = 2'-O-methylcytidine-3'-phosphate
  modified_base 14: mod_base = OTHER; note = 2'-deoxy-2'-fluorouridine-3'-phosphate
  modified_base 15: mod_base = OTHER; note = 2'-O-methyluridine-3'-phosphate
  modified_base 16: mod_base = OTHER; note = 2'-deoxy-2'-fluorocytidine-3'-phosphate
  modified_base 17: mod_base = OTHER; note = 2'-O-methyladenosine-3'-phosphate
  modified_base 18: mod_base = OTHER; note = 2'-O-methylguanosine-3'-phosphate
  modified_base 19: mod_base = OTHER; note = 2'-O-methyladenosine-3'-phosphate
  modified_base 20: mod_base = OTHER; note = 2'-O-methylguanosine-3'-phosphate
  modified_base 21: mod_base = OTHER; note = 2'-O-methyladenosine-3'-phosphorothioate
  modified_base 22: mod_base = OTHER; note = 2'-O-methylcytidine-3'-phosphorothioate
  modified_base 23: mod_base = OTHER; note = 2'-O-methyladenosine
tactgccactgtcttcagagaca

SEQ ID NO: 1447 - RNA, 23 nt, synthetic construct
  source 1..23: mol_type = other RNA
  modified_base 1: mod_base = OTHER; note = 2'-O-methyluridine-3'-phosphorothioate 5'-(E)-Vinylphosphonate
  modified_base 2: mod_base = OTHER; note = 2'-deoxy-2'-fluoroguanosine-3'-phosphorothioate
  modified_base 3: mod_base = OTHER; note = 2'-O-methylcytidine-3'-phosphate
  modified_base 4: mod_base = OTHER; note = 2'-O-methyladenosine-3'-phosphate
  modified_base 5: mod_base = OTHER; note = 2'-O-methylguanosine-3'-phosphate
  modified_base 6: mod_base = OTHER; note = 2'-deoxy-2'-fluoroguanosine-3'-phosphate
  modified_base 7: mod_base = OTHER; note = 2'-O-methylguanosine-3'-phosphate
  modified_base 8: mod_base = OTHER; note = 2'-deoxy-2'-fluorocytidine-3'-phosphate
  modified_base 9: mod_base = OTHER; note = 2'-deoxy-2'-fluoroguanosine-3'-phosphate
  modified_base 10: mod_base = OTHER; note = 2'-O-methyladenosine-3'-phosphate
  modified_base 11: mod_base = OTHER; note = 2'-O-methyluridine-3'-phosphate
  modified_base 12: mod_base = OTHER; note = 2'-O-methylcytidine-3'-phosphate
  modified_base 13: mod_base = OTHER; note = 2'-O-methyladenosine-3'-phosphate
  modified_base 14: mod_base = OTHER; note = 2'-deoxy-2'-fluorocytidine-3'-phosphate
  modified_base 15: mod_base = OTHER; note = 2'-O-methyluridine-3'-phosphate
  modified_base 16: mod_base = OTHER; note = 2'-deoxy-2'-fluoroguanosine-3'-phosphate
  modified_base 17: mod_base = OTHER; note = 2'-O-methylcytidine-3'-phosphate
  modified_base 18: mod_base = OTHER; note = 2'-O-methylcytidine-3'-phosphate
  modified_base 19: mod_base = OTHER; note = 2'-O-methyladenosine-3'-phosphate
  modified_base 20: mod_base = OTHER; note = 2'-O-methylcytidine-3'-phosphate
  modified_base 21: mod_base = OTHER; note = 2'-O-methyluridine-3'-phosphorothioate
  modified_base 22: mod_base = OTHER; note = 2'-O-methylguanosine-3'-phosphorothioate
  modified_base 23: mod_base = OTHER; note = 2'-O-methyluridine
tgcagggcgatcactgccactgt

SEQ ID NO: 1448 - RNA, 23 nt, synthetic construct
  source 1..23: mol_type = other RNA
  modified_base 1: mod_base = OTHER; note = 2'-O-methyluridine-3'-phosphorothioate 5'-(E)-Vinylphosphonate
  modified_base 2: mod_base = OTHER; note = 2'-deoxy-2'-fluoroadenosine-3'-phosphorothioate
  modified_base 3: mod_base = OTHER; note = 2'-O-methyladenosine-3'-phosphate
  modified_base 4: mod_base = OTHER; note = 2'-O-methylcytidine-3'-phosphate
  modified_base 5: mod_base = OTHER; note = 2'-O-methyladenosine-3'-phosphate
  modified_base 6: mod_base = OTHER; note = 2'-deoxy-2'-fluorocytidine-3'-phosphate
  modified_base 7: mod_base = OTHER; note = 2'-O-methylcytidine-3'-phosphate
  modified_base 8: mod_base = OTHER; note = 2'-deoxy-2'-fluoroadenosine-3'-phosphate
  modified_base 9: mod_base = OTHER; note = 2'-deoxy-2'-fluorouridine-3'-phosphate
  modified_base 10: mod_base = OTHER; note = 2'-O-methylcytidine-3'-phosphate
  modified_base 11: mod_base = OTHER; note = 2'-O-methylcytidine-3'-phosphate
  modified_base 12: mod_base = OTHER; note = 2'-O-methylguanosine-3'-phosphate
  modified_base 13: mod_base = OTHER; note = 2'-O-methylguanosine-3'-phosphate
  modified_base 14: mod_base = OTHER; note = 2'-deoxy-2'-fluoroadenosine-3'-phosphate
  modified_base 15: mod_base = OTHER; note = 2'-O-methylguanosine-3'-phosphate
  modified_base 16: mod_base = OTHER; note = 2'-deoxy-2'-fluorocytidine-3'-phosphate
  modified_base 17: mod_base = OTHER; note = 2'-O-methylcytidine-3'-phosphate
  modified_base 18: mod_base = OTHER; note = 2'-O-methylguanosine-3'-phosphate
  modified_base 19: mod_base = OTHER; note = 2'-O-methylguanosine-3'-phosphate
  modified_base 20: mod_base = OTHER; note = 2'-O-methyluridine-3'-phosphate
  modified_base 21: mod_base = OTHER; note = 2'-O-methylguanosine-3'-phosphorothioate
  modified_base 22: mod_base = OTHER; note = 2'-O-methylcytidine-3'-phosphorothioate
  modified_base 23: mod_base = OTHER; note = 2'-O-methyladenosine
taacaccatccggagccggtgca

SEQ ID NO: 1449 - RNA, 23 nt, synthetic construct
  source 1..23: mol_type = other RNA
  modified_base 1: mod_base = OTHER; note = 2'-O-methyluridine-3'-phosphorothioate 5'-(E)-Vinylphosphonate
  modified_base 2: mod_base = OTHER; note = 2'-deoxy-2'-fluoroadenosine-3'-phosphorothioate
  modified_base 3: mod_base = OTHER; note = 2'-O-methylguanosine-3'-phosphate
  modified_base 4: mod_base = OTHER; note = 2'-O-methylguanosine-3'-phosphate
  modified_base 5: mod_base = OTHER; note = 2'-O-methylcytidine-3'-phosphate
  modified_base 6: mod_base = OTHER; note = 2'-deoxy-2'-fluorocytidine-3'-phosphate
  modified_base 7: mod_base = OTHER; note = 2'-O-methylguanosine-3'-phosphate
  modified_base 8: mod_base = OTHER; note = 2'-deoxy-2'-fluorouridine-3'-phosphate
  modified_base 9: mod_base = OTHER; note = 2'-deoxy-2'-fluoroguanosine-3'-phosphate
  modified_base 10: mod_base = OTHER; note = 2'-O-methylcytidine-3'-phosphate
  modified_base 11: mod_base = OTHER; note = 2'-O-methylguanosine-3'-phosphate
  modified_base 12: mod_base = OTHER; note = 2'-O-methyladenosine-3'-phosphate
  modified_base 13: mod_base = OTHER; note = 2'-O-methyluridine-3'-phosphate
  modified_base 14: mod_base = OTHER; note = 2'-deoxy-2'-fluorouridine-3'-phosphate
  modified_base 15: mod_base = OTHER; note = 2'-O-methyladenosine-3'-phosphate
  modified_base 16: mod_base = OTHER; note = 2'-deoxy-2'-fluoroguanosine-3'-phosphate
  modified_base 17: mod_base = OTHER; note = 2'-O-methylguanosine-3'-phosphate
  modified_base 18: mod_base = OTHER; note = 2'-O-methylcytidine-3'-phosphate
  modified_base 19: mod_base = OTHER; note = 2'-O-methyluridine-3'-phosphate
  modified_base 20: mod_base = OTHER; note = 2'-O-methylguanosine-3'-phosphate
  modified_base 21: mod_base = OTHER; note = 2'-O-methyluridine-3'-phosphorothioate
  modified_base 22: mod_base = OTHER; note = 2'-O-methyluridine-3'-phosphorothioate
  modified_base 23: mod_base = OTHER; note = 2'-O-methyluridine
taggccgtgcgattaggctgttt

SEQ ID NO: 1450 - RNA, 23 nt, synthetic construct
  source 1..23: mol_type = other RNA
  modified_base 1: mod_base = OTHER; note = 2'-O-methyluridine-3'-phosphorothioate 5'-(E)-Vinylphosphonate
  modified_base 2: mod_base = OTHER; note = 2'-deoxy-2'-fluoroadenosine-3'-phosphorothioate
  modified_base 3: mod_base = OTHER; note = 2'-O-methyladenosine-3'-phosphate
  modified_base 4: mod_base = OTHER; note = 2'-O-methyladenosine-3'-phosphate
  modified_base 5: mod_base = OTHER; note = 2'-O-methylguanosine-3'-phosphate
  modified_base 6: mod_base = OTHER; note = 2'-deoxy-2'-fluoroguanosine-3'-phosphate
  modified_base 7: mod_base = OTHER; note = 2'-O-methyladenosine-3'-phosphate
  modified_base 8: mod_base = OTHER; note = 2'-deoxy-2'-fluoroguanosine-3'-phosphate
  modified_base 9: mod_base = OTHER; note = 2'-deoxy-2'-fluoroguanosine-3'-phosphate
  modified_base 10: mod_base = OTHER; note = 2'-O-methylcytidine-3'-phosphate
  modified_base 11: mod_base = OTHER; note = 2'-O-methylcytidine-3'-phosphate
  modified_base 12: mod_base = OTHER; note = 2'-O-methylguanosine-3'-phosphate
  modified_base 13: mod_base = OTHER; note = 2'-O-methyluridine-3'-phosphate
  modified_base 14: mod_base = OTHER; note = 2'-deoxy-2'-fluoroguanosine-3'-phosphate
  modified_base 15: mod_base = OTHER; note = 2'-O-methylcytidine-3'-phosphate
  modified_base 16: mod_base = OTHER; note = 2'-deoxy-2'-fluoroguanosine-3'-phosphate
  modified_base 17: mod_base = OTHER; note = 2'-O-methyladenosine-3'-phosphate
  modified_base 18: mod_base = OTHER; note = 2'-O-methyluridine-3'-phosphate
  modified_base 19: mod_base = OTHER; note = 2'-O-methyluridine-3'-phosphate
  modified_base 20: mod_base = OTHER; note = 2'-O-methyladenosine-3'-phosphate
  modified_base 21: mod_base = OTHER; note = 2'-O-methylguanosine-3'-phosphorothioate
  modified_base 22: mod_base = OTHER; note = 2'-O-methylguanosine-3'-phosphorothioate
  modified_base 23: mod_base = OTHER; note = 2'-O-methylcytidine
taaaggaggccgtgcgattaggc

SEQ ID NO: 1451 - RNA, 23 nt, synthetic construct
  source 1..23: mol_type = other RNA
  modified_base 1: mod_base = OTHER; note = 2'-O-methyluridine-3'-phosphorothioate 5'-(E)-Vinylphosphonate
  modified_base 2: mod_base = OTHER; note = 2'-deoxy-2'-fluorocytidine-3'-phosphorothioate
  modified_base 3: mod_base = OTHER; note = 2'-O-methyladenosine-3'-phosphate
  modified_base 4: mod_base = OTHER; note = 2'-O-methylguanosine-3'-phosphate
  modified_base 5: mod_base = OTHER; note = 2'-O-methylguanosine-3'-phosphate
  modified_base 6: mod_base = OTHER; note = 2'-deoxy-2'-fluoroguanosine-3'-phosphate
  modified_base 7: mod_base = OTHER; note = 2'-O-methyladenosine-3'-phosphate
  modified_base 8: mod_base = OTHER; note = 2'-deoxy-2'-fluoroadenosine-3'-phosphate
  modified_base 9: mod_base = OTHER; note = 2'-deoxy-2'-fluoroadenosine-3'-phosphate
  modified_base 10: mod_base = OTHER; note = 2'-O-methylguanosine-3'-phosphate
  modified_base 11: mod_base = OTHER; note = 2'-O-methylguanosine-3'-phosphate
  modified_base 12: mod_base = OTHER; note = 2'-O-methyladenosine-3'-phosphate
  modified_base 13: mod_base = OTHER; note = 2'-O-methylguanosine-3'-phosphate
  modified_base 14: mod_base = OTHER; note = 2'-deoxy-2'-fluoroguanosine-3'-phosphate
  modified_base 15: mod_base = OTHER; note = 2'-O-methylcytidine-3'-phosphate
  modified_base 16: mod_base = OTHER; note = 2'-deoxy-2'-fluorocytidine-3'-phosphate
  modified_base 17: mod_base = OTHER; note = 2'-O-methylguanosine-3'-phosphate
  modified_base 18: mod_base = OTHER; note = 2'-O-methyluridine-3'-phosphate
  modified_base 19: mod_base = OTHER; note = 2'-O-methylguanosine-3'-phosphate
  modified_base 20: mod_base = OTHER; note = 2'-O-methylcytidine-3'-phosphate
  modified_base 21: mod_base = OTHER; note = 2'-O-methylguanosine-3'-phosphorothioate
  modified_base 22: mod_base = OTHER; note = 2'-O-methyladenosine-3'-phosphorothioate
  modified_base 23: mod_base = OTHER; note = 2'-O-methyluridine
tcagggaaaggaggccgtgcgat

SEQ ID NO: 1452 - RNA, 23 nt, synthetic construct
  source 1..23: mol_type = other RNA
  modified_base 1: mod_base = OTHER; note = 2'-O-methyluridine-3'-phosphorothioate 5'-(E)-Vinylphosphonate
  modified_base 2: mod_base = OTHER; note = 2'-deoxy-2'-fluorouridine-3'-phosphorothioate
  modified_base 3: mod_base = OTHER; note = 2'-O-methyladenosine-3'-phosphate
  modified_base 4: mod_base = OTHER; note = 2'-O-methylcytidine-3'-phosphate
  modified_base 5: mod_base = OTHER; note = 2'-O-methylguanosine-3'-phosphate
  modified_base 6: mod_base = OTHER; note = 2'-deoxy-2'-fluoroguanosine-3'-phosphate
  modified_base 7: mod_base = OTHER; note = 2'-O-methyluridine-3'-phosphate
  modified_base 8: mod_base = OTHER; note = 2'-deoxy-2'-fluoroguanosine-3'-phosphate
  modified_base 9: mod_base = OTHER; note = 2'-deoxy-2'-fluorocytidine-3'-phosphate
  modified_base 10: mod_base = OTHER; note = 2'-O-methyladenosine-3'-phosphate
  modified_base 11: mod_base = OTHER; note = 2'-O-methylguanosine-3'-phosphate
  modified_base 12: mod_base = OTHER; note = 2'-O-methylguanosine-3'-phosphate
  modified_base 13: mod_base = OTHER; note = 2'-O-methylguanosine-3'-phosphate
  modified_base 14: mod_base = OTHER; note = 2'-deoxy-2'-fluoroadenosine-3'-phosphate
  modified_base 15: mod_base = OTHER; note = 2'-O-methyladenosine-3'-phosphate
  modified_base 16: mod_base = OTHER; note = 2'-deoxy-2'-fluoroadenosine-3'-phosphate
  modified_base 17: mod_base = OTHER; note = 2'-O-methylguanosine-3'-phosphate
  modified_base 18: mod_base = OTHER; note = 2'-O-methylguanosine-3'-phosphate
  modified_base 19: mod_base = OTHER; note = 2'-O-methyladenosine-3'-phosphate
  modified_base 20: mod_base = OTHER; note = 2'-O-methylguanosine-3'-phosphate
  modified_base 21: mod_base = OTHER; note = 2'-O-methylguanosine-3'-phosphorothioate
  modified_base 22: mod_base = OTHER; note = 2'-O-methylcytidine-3'-phosphorothioate
  modified_base 23: mod_base = OTHER; note = 2'-O-methylcytidine
ttacggtgcagggaaaggaggcc

SEQ ID NO: 1453 - RNA, 23 nt, synthetic construct
  source 1..23: mol_type = other RNA
  modified_base 1: mod_base = OTHER; note = 2'-O-methyluridine-3'-phosphorothioate 5'-(E)-Vinylphosphonate
  modified_base 2: mod_base = OTHER; note = 2'-deoxy-2'-fluoroadenosine-3'-phosphorothioate
  modified_base 3: mod_base = OTHER; note = 2'-O-methylguanosine-3'-phosphate
  modified_base 4: mod_base = OTHER; note = 2'-O-methylguanosine-3'-phosphate
  modified_base 5: mod_base = OTHER; note = 2'-O-methyladenosine-3'-phosphate
  modified_base 6: mod_base = OTHER; note = 2'-deoxy-2'-fluoroguanosine-3'-phosphate
  modified_base 7: mod_base = OTHER; note = 2'-O-methyluridine-3'-phosphate
  modified_base 8: mod_base = OTHER; note = 2'-deoxy-2'-fluoroadenosine-3'-phosphate
  modified_base 9: mod_base = OTHER; note = 2'-deoxy-2'-fluorocytidine-3'-phosphate
  modified_base 10: mod_base = OTHER; note = 2'-O-methylguanosine-3'-phosphate
  modified_base 11: mod_base = OTHER; note = 2'-O-methylguanosine-3'-phosphate
  modified_base 12: mod_base = OTHER; note = 2'-O-methyluridine-3'-phosphate
  modified_base 13: mod_base = OTHER; note = 2'-O-methylguanosine-3'-phosphate
  modified_base 14: mod_base = OTHER; note = 2'-deoxy-2'-fluorocytidine-3'-phosphate
  modified_base 15: mod_base = OTHER; note = 2'-O-methyladenosine-3'-phosphate
  modified_base 16: mod_base = OTHER; note = 2'-deoxy-2'-fluoroguanosine-3'-phosphate
  modified_base 17: mod_base = OTHER; note = 2'-O-methylguanosine-3'-phosphate
  modified_base 18: mod_base = OTHER; note = 2'-O-methylguanosine-3'-phosphate
  modified_base 19: mod_base = OTHER; note = 2'-O-methyladenosine-3'-phosphate
  modified_base 20: mod_base = OTHER; note = 2'-O-methyladenosine-3'-phosphate
  modified_base 21: mod_base = OTHER; note = 2'-O-methyladenosine-3'-phosphorothioate
  modified_base 22: mod_base = OTHER; note = 2'-O-methylguanosine-3'-phosphorothioate
  modified_base 23: mod_base = OTHER; note = 2'-O-methylguanosine
taggagtacggtgcagggaaagg

SEQ ID NO: 1454 - RNA, 23 nt, synthetic construct
  source 1..23: mol_type = other RNA
  modified_base 1: mod_base = OTHER; note = 2'-O-methyluridine-3'-phosphorothioate 5'-(E)-Vinylphosphonate
  modified_base 2: mod_base = OTHER; note = 2'-deoxy-2'-fluoroadenosine-3'-phosphorothioate
  modified_base 3: mod_base = OTHER; note = 2'-O-methylguanosine-3'-phosphate
  modified_base 4: mod_base = OTHER; note = 2'-O-methylguanosine-3'-phosphate
  modified_base 5: mod_base = OTHER; note = 2'-O-methylguanosine-3'-phosphate
  modified_base 6: mod_base = OTHER; note = 2'-deoxy-2'-fluorouridine-3'-phosphate
  modified_base 7: mod_base = OTHER; note = 2'-O-methylguanosine-3'-phosphate
  modified_base 8: mod_base = OTHER; note = 2'-deoxy-2'-fluoroadenosine-3'-phosphate
  modified_base 9: mod_base = OTHER; note = 2'-deoxy-2'-fluoroguanosine-3'-phosphate
  modified_base 10: mod_base = OTHER; note = 2'-O-methylguanosine-3'-phosphate
  modified_base 11: mod_base = OTHER; note = 2'-O-methyladenosine-3'-phosphate
  modified_base 12: mod_base = OTHER; note = 2'-O-methylguanosine-3'-phosphate
  modified_base 13: mod_base = OTHER; note = 2'-O-methyluridine-3'-phosphate
  modified_base 14: mod_base = OTHER; note = 2'-deoxy-2'-fluoroadenosine-3'-phosphate
  modified_base 15: mod_base = OTHER; note = 2'-O-methylcytidine-3'-phosphate
  modified_base 16: mod_base = OTHER; note = 2'-deoxy-2'-fluoroguanosine-3'-phosphate
  modified_base 17: mod_base = OTHER; note = 2'-O-methylguanosine-3'-phosphate
  modified_base 18: mod_base = OTHER; note = 2'-O-methyluridine-3'-phosphate
  modified_base 19: mod_base = OTHER; note = 2'-O-methylguanosine-3'-phosphate
  modified_base 20: mod_base = OTHER; note = 2'-O-methylcytidine-3'-phosphate
  modified_base 21: mod_base = OTHER; note = 2'-O-methyladenosine-3'-phosphorothioate
  modified_base 22: mod_base = OTHER; note = 2'-O-methylguanosine-3'-phosphorothioate
  modified_base 23: mod_base = OTHER; note = 2'-O-methylguanosine
tagggtgaggagtacggtgcagg

SEQ ID NO: 1455 - RNA, 23 nt, synthetic construct
  source 1..23: mol_type = other RNA
  modified_base 1: mod_base = OTHER; note = 2'-O-methyluridine-3'-phosphorothioate 5'-(E)-Vinylphosphonate
  modified_base 2: mod_base = OTHER; note = 2'-deoxy-2'-fluoroadenosine-3'-phosphorothioate
  modified_base 3: mod_base = OTHER; note = 2'-O-methylguanosine-3'-phosphate
  modified_base 4: mod_base = OTHER; note = 2'-O-methyladenosine-3'-phosphate
  modified_base 5: mod_base = OTHER; note = 2'-O-methylguanosine-3'-phosphate
  modified_base 6: mod_base = OTHER; note = 2'-deoxy-2'-fluoroadenosine-3'-phosphate
  modified_base 7: mod_base = OTHER; note = 2'-O-methyladenosine-3'-phosphate
  modified_base 8: mod_base = OTHER; note = 2'-deoxy-2'-fluoroguanosine-3'-phosphate
  modified_base 9: mod_base = OTHER; note = 2'-deoxy-2'-fluorocytidine-3'-phosphate
  modified_base 10: mod_base = OTHER; note = 2'-O-methyladenosine-3'-phosphate
  modified_base 11: mod_base = OTHER; note = 2'-O-methylguanosine-3'-phosphate
  modified_base 12: mod_base = OTHER; note = 2'-O-methylguanosine-3'-phosphate
  modified_base 13: mod_base = OTHER; note = 2'-O-methylguanosine-3'-phosphate
  modified_base 14: mod_base = OTHER; note = 2'-deoxy-2'-fluorouridine-3'-phosphate
  modified_base 15: mod_base = OTHER; note = 2'-O-methylguanosine-3'-phosphate
  modified_base 16: mod_base = OTHER; note = 2'-deoxy-2'-fluoroadenosine-3'-phosphate
  modified_base 17: mod_base = OTHER; note = 2'-O-methylguanosine-3'-phosphate
  modified_base 18: mod_base = OTHER; note = 2'-O-methylguanosine-3'-phosphate
  modified_base 19: mod_base = OTHER; note = 2'-O-methyladenosine-3'-phosphate
  modified_base 20: mod_base = OTHER; note = 2'-O-methylguanosine-3'-phosphate
  modified_base 21: mod_base = OTHER; note = 2'-O-methyluridine-3'-phosphorothioate
  modified_base 22: mod_base = OTHER; note = 2'-O-methyladenosine-3'-phosphorothioate
  modified_base 23: mod_base = OTHER; note = 2'-O-methylcytidine
tagagaagcagggtgaggagtac

SEQ ID NO: 1456 - RNA, 23 nt, synthetic construct
  source 1..23: mol_type = other RNA
  modified_base 1: mod_base = OTHER; note = 2'-O-methyluridine-3'-phosphorothioate 5'-(E)-Vinylphosphonate
  modified_base 2: mod_base = OTHER; note = 2'-deoxy-2'-fluoroguanosine-3'-phosphorothioate
  modified_base 3: mod_base = OTHER; note = 2'-O-methyluridine-3'-phosphate
  modified_base 4: mod_base = OTHER; note = 2'-O-methylguanosine-3'-phosphate
  modified_base 5: mod_base = OTHER; note = 2'-O-methylguanosine-3'-phosphate
  modified_base 6: mod_base = OTHER; note = 2'-deoxy-2'-fluorocytidine-3'-phosphate
  modified_base 7: mod_base = OTHER; note = 2'-O-methylcytidine-3'-phosphate
  modified_base 8: mod_base = OTHER; note = 2'-deoxy-2'-fluorocytidine-3'-phosphate
  modified_base 9: mod_base = OTHER; note = 2'-deoxy-2'-fluoroadenosine-3'-phosphate
  modified_base 10: mod_base = OTHER; note = 2'-O-methylguanosine-3'-phosphate
  modified_base 11: mod_base = OTHER; note = 2'-O-methyladenosine-3'-phosphate
  modified_base 12: mod_base = OTHER; note = 2'-O-methylguanosine-3'-phosphate
  modified_base 13: mod_base = OTHER; note = 2'-O-methyladenosine-3'-phosphate
  modified_base 14: mod_base = OTHER; note = 2'-deoxy-2'-fluoroadenosine-3'-phosphate
  modified_base 15: mod_base = OTHER; note = 2'-O-methylguanosine-3'-phosphate
  modified_base 16: mod_base = OTHER; note = 2'-deoxy-2'-fluorocytidine-3'-phosphate
  modified_base 17: mod_base = OTHER; note = 2'-O-methyladenosine-3'-phosphate
  modified_base 18: mod_base = OTHER; note = 2'-O-methylguanosine-3'-phosphate
  modified_base 19: mod_base = OTHER; note = 2'-O-methylguanosine-3'-phosphate
  modified_base 20: mod_base = OTHER; note = 2'-O-methylguanosine-3'-phosphate
  modified_base 21: mod_base = OTHER; note = 2'-O-methyluridine-3'-phosphorothioate
  modified_base 22: mod_base = OTHER; note = 2'-O-methylguanosine-3'-phosphorothioate
  modified_base 23: mod_base = OTHER; note = 2'-O-methyladenosine
tgtggcccagagaagcagggtga

SEQ ID NO: 1457 - RNA, 23 nt, synthetic construct
  source 1..23: mol_type = other RNA
  modified_base 1: mod_base = OTHER; note = 2'-O-methyluridine-3'-phosphorothioate 5'-(E)-Vinylphosphonate
  modified_base 2: mod_base = OTHER; note = 2'-deoxy-2'-fluoroadenosine-3'-phosphorothioate
  modified_base 3: mod_base = OTHER; note = 2'-O-methyladenosine-3'-phosphate
  modified_base 4: mod_base = OTHER; note = 2'-O-methyladenosine-3'-phosphate
  modified_base 5: mod_base = OTHER; note = 2'-O-methylcytidine-3'-phosphate
  modified_base 6: mod_base = OTHER; note = 2'-deoxy-2'-fluorouridine-3'-phosphate
  modified_base 7: mod_base = OTHER; note = 2'-O-methylguanosine-3'-phosphate
  modified_base 8: mod_base = OTHER; note = 2'-deoxy-2'-fluoroguanosine-3'-phosphate
  modified_base 9: mod_base = OTHER; note = 2'-deoxy-2'-fluorouridine-3'-phosphate
  modified_base 10: mod_base = OTHER; note = 2'-O-methylguanosine-3'-phosphate
  modified_base 11: mod_base = OTHER; note = 2'-O-methylguanosine-3'-phosphate
  modified_base 12: mod_base = OTHER; note = 2'-O-methylcytidine-3'-phosphate
  modified_base 13: mod_base = OTHER; note = 2'-O-methylcytidine-3'-phosphate
  modified_base 14: mod_base = OTHER; note = 2'-deoxy-2'-fluorocytidine-3'-phosphate
  modified_base 15: mod_base = OTHER; note = 2'-O-methyladenosine-3'-phosphate
  modified_base 16: mod_base = OTHER; note = 2'-deoxy-2'-fluoroguanosine-3'-phosphate
  modified_base 17: mod_base = OTHER; note = 2'-O-methyladenosine-3'-phosphate
  modified_base 18: mod_base = OTHER; note = 2'-O-methylguanosine-3'-phosphate
  modified_base 19: mod_base = OTHER; note = 2'-O-methyladenosine-3'-phosphate
  modified_base 20: mod_base = OTHER; note = 2'-O-methyladenosine-3'-phosphate
  modified_base 21: mod_base = OTHER; note = 2'-O-methylguanosine-3'-phosphorothioate
  modified_base 22: mod_base = OTHER; note = 2'-O-methylcytidine-3'-phosphorothioate
  modified_base 23: mod_base = OTHER; note = 2'-O-methyladenosine
taaactggtggcccagagaagca

SEQ ID NO: 1458 - RNA, 23 nt, synthetic construct
  source 1..23: mol_type = other RNA
  modified_base 1: mod_base = OTHER; note = 2'-O-methyluridine-3'-phosphorothioate 5'-(E)-Vinylphosphonate
  modified_base 2: mod_base = OTHER; note = 2'-deoxy-2'-fluoroguanosine-3'-phosphorothioate
  modified_base 3: mod_base = OTHER; note = 2'-O-methylguanosine-3'-phosphate
  modified_base 4: mod_base = OTHER; note = 2'-O-methylguanosine-3'-phosphate
  modified_base 5: mod_base = OTHER; note = 2'-O-methyluridine-3'-phosphate
  modified_base 6: mod_base = OTHER; note = 2'-deoxy-2'-fluoroguanosine-3'-phosphate
  modified_base 7: mod_base = OTHER; note = 2'-O-methyladenosine-3'-phosphate
  modified_base 8: mod_base = OTHER; note = 2'-deoxy-2'-fluoroadenosine-3'-phosphate
  modified_base 9: mod_base = OTHER; note = 2'-deoxy-2'-fluoroadenosine-3'-phosphate
  modified_base 10: mod_base = OTHER; note = 2'-O-methylcytidine-3'-phosphate
  modified_base 11: mod_base = OTHER; note = 2'-O-methyluridine-3'-phosphate
  modified_base 12: mod_base = OTHER; note = 2'-O-methylguanosine-3'-phosphate
  modified_base 13: mod_base = OTHER; note = 2'-O-methylguanosine-3'-phosphate
  modified_base 14: mod_base = OTHER; note = 2'-deoxy-2'-fluorouridine-3'-phosphate
  modified_base 15: mod_base = OTHER; note = 2'-O-methylguanosine-3'-phosphate
  modified_base 16: mod_base = OTHER; note = 2'-deoxy-2'-fluoroguanosine-3'-phosphate
  modified_base 17: mod_base = OTHER; note = 2'-O-methylcytidine-3'-phosphate
  modified_base 18: mod_base = OTHER; note = 2'-O-methylcytidine-3'-phosphate
  modified_base 19: mod_base = OTHER; note = 2'-O-methylcytidine-3'-phosphate
  modified_base 20: mod_base = OTHER; note = 2'-O-methyladenosine-3'-phosphate
  modified_base 21: mod_base = OTHER; note = 2'-O-methylguanosine-3'-phosphorothioate
  modified_base 22: mod_base = OTHER; note = 2'-O-methyladenosine-3'-phosphorothioate
  modified_base 23: mod_base = OTHER; note = 2'-O-methylguanosine
tgggtgaaactggtggcccagag

SEQ ID NO: 1459 - RNA, 23 nt, synthetic construct
  source 1..23: mol_type = other RNA
  modified_base 1: mod_base = OTHER; note = 2'-O-methyluridine-3'-phosphorothioate 5'-(E)-Vinylphosphonate
  modified_base 2: mod_base = OTHER; note = 2'-deoxy-2'-fluorouridine-3'-phosphorothioate
  modified_base 3: mod_base = OTHER; note = 2'-O-methylguanosine-3'-phosphate
  modified_base 4: mod_base = OTHER; note = 2'-O-methylguanosine-3'-phosphate
  modified_base 5: mod_base = OTHER; note = 2'-O-methylcytidine-3'-phosphate
  modified_base 6: mod_base = OTHER; note = 2'-deoxy-2'-fluoroadenosine-3'-phosphate
  modified_base 7: mod_base = OTHER; note = 2'-O-methyladenosine-3'-phosphate
  modified_base 8: mod_base = OTHER; note = 2'-deoxy-2'-fluoroguanosine-3'-phosphate
  modified_base 9: mod_base = OTHER; note = 2'-deoxy-2'-fluoroguanosine-3'-phosphate
  modified_base 10: mod_base = OTHER; note = 2'-O-methylguanosine-3'-phosphate
  modified_base 11: mod_base = OTHER; note = 2'-O-methyluridine-3'-phosphate
  modified_base 12: mod_base = OTHER; note = 2'-O-methylguanosine-3'-phosphate
  modified_base 13: mod_base = OTHER; note = 2'-O-methyladenosine-3'-phosphate
  modified_base 14: mod_base = OTHER; note = 2'-deoxy-2'-fluoroadenosine-3'-phosphate
  modified_base 15: mod_base = OTHER; note = 2'-O-methyladenosine-3'-phosphate
  modified_base 16: mod_base = OTHER; note = 2'-deoxy-2'-fluorocytidine-3'-phosphate
  modified_base 17: mod_base = OTHER; note = 2'-O-methyluridine-3'-phosphate
  modified_base 18: mod_base = OTHER; note = 2'-O-methylguanosine-3'-phosphate
  modified_base 19: mod_base = OTHER; note = 2'-O-methylguanosine-3'-phosphate
  modified_base 20: mod_base = OTHER; note = 2'-O-methyluridine-3'-phosphate
  modified_base 21: mod_base = OTHER; note = 2'-O-methylguanosine-3'-phosphorothioate
  modified_base 22: mod_base = OTHER; note = 2'-O-methylguanosine-3'-phosphorothioate
  modified_base 23: mod_base = OTHER; note = 2'-O-methylcytidine
ttggcaagggtgaaactggtggc

SEQ ID NO: 1460 - RNA, 23 nt, synthetic construct
  source 1..23: mol_type = other RNA
  modified_base 1: mod_base = OTHER; note = 2'-O-methyluridine-3'-phosphorothioate 5'-(E)-Vinylphosphonate
  modified_base 2: mod_base = OTHER; note = 2'-deoxy-2'-fluoroadenosine-3'-phosphorothioate
  modified_base 3: mod_base = OTHER; note = 2'-O-methylguanosine-3'-phosphate
  modified_base 4: mod_base = OTHER; note = 2'-O-methylcytidine-3'-phosphate
  modified_base 5: mod_base = OTHER; note = 2'-O-methylcytidine-3'-phosphate
  modified_base 6: mod_base = OTHER; note = 2'-deoxy-2'-fluoroadenosine-3'-phosphate
  modified_base 7: mod_base = OTHER; note = 2'-O-methyladenosine-3'-phosphate
  modified_base 8: mod_base = OTHER; note = 2'-deoxy-2'-fluoroguanosine-3'-phosphate
  modified_base 9: mod_base = OTHER; note = 2'-deoxy-2'-fluoroguanosine-3'-phosphate
  modified_base 10: mod_base = OTHER; note = 2'-O-methyluridine-3'-phosphate
  modified_base 11: mod_base = OTHER; note = 2'-O-methylguanosine-3'-phosphate
  modified_base 12: mod_base = OTHER; note = 2'-O-methylguanosine-3'-phosphate
  modified_base 13: mod_base = OTHER; note = 2'-O-methylcytidine-3'-phosphate
  modified_base 14: mod_base = OTHER; note = 2'-deoxy-2'-fluoroadenosine-3'-phosphate
  modified_base 15: mod_base = OTHER; note = 2'-O-methyladenosine-3'-phosphate
  modified_base 16: mod_base = OTHER; note = 2'-deoxy-2'-fluoroguanosine-3'-phosphate
  modified_base 17: mod_base = OTHER; note = 2'-O-methylguanosine-3'-phosphate
  modified_base 18: mod_base = OTHER; note = 2'-O-methylguanosine-3'-phosphate
  modified_base 19: mod_base = OTHER; note = 2'-O-methyluridine-3'-phosphate
  modified_base 20: mod_base = OTHER; note = 2'-O-methylguanosine-3'-phosphate
  modified_base 21: mod_base = OTHER; note = 2'-O-methyladenosine-3'-phosphorothioate
  modified_base 22: mod_base = OTHER; note = 2'-O-methyladenosine-3'-phosphorothioate
  modified_base 23: mod_base = OTHER; note = 2'-O-methyladenosine
tagccaaggtggcaagggtgaaa

SEQ ID NO: 1461 - RNA, 23 nt, synthetic construct
  source 1..23: mol_type = other RNA
  modified_base 1: mod_base = OTHER; note = 2'-O-methyluridine-3'-phosphorothioate 5'-(E)-Vinylphosphonate
  modified_base 2: mod_base = OTHER; note = 2'-deoxy-2'-fluorouridine-3'-phosphorothioate
  modified_base 3: mod_base = OTHER; note = 2'-O-methyluridine-3'-phosphate
  modified_base 4: mod_base = OTHER; note = 2'-O-methylcytidine-3'-phosphate
  modified_base 5: mod_base = OTHER; note = 2'-O-methyladenosine-3'-phosphate
  modified_base 6: mod_base = OTHER; note = 2'-deoxy-2'-fluoroadenosine-3'-phosphate
  modified_base 7: mod_base = OTHER; note = 2'-O-methylguanosine-3'-phosphate
  modified_base 8: mod_base = OTHER; note = 2'-deoxy-2'-fluoroguanosine-3'-phosphate
  modified_base 9: mod_base = OTHER; note = 2'-deoxy-2'-fluorouridine-3'-phosphate
  modified_base 10: mod_base = OTHER; note = 2'-O-methyladenosine-3'-phosphate
  modified_base 11: mod_base = OTHER; note = 2'-O-methylguanosine-3'-phosphate
  modified_base 12: mod_base = OTHER; note = 2'-O-methylcytidine-3'-phosphate
  modified_base 13: mod_base = OTHER; note = 2'-O-methylcytidine-3'-phosphate
  modified_base 14: mod_base = OTHER; note = 2'-deoxy-2'-fluoroadenosine-3'-phosphate
  modified_base 15: mod_base = OTHER; note = 2'-O-methyladenosine-3'-phosphate
  modified_base 16: mod_base = OTHER; note = 2'-deoxy-2'-fluoroguanosine-3'-phosphate
  modified_base 17: mod_base = OTHER; note = 2'-O-methylguanosine-3'-phosphate
  modified_base 18: mod_base = OTHER; note = 2'-O-methyluridine-3'-phosphate
  modified_base 19: mod_base = OTHER; note = 2'-O-methylguanosine-3'-phosphate
  modified_base 20: mod_base = OTHER; note = 2'-O-methylguanosine-3'-phosphate
  modified_base 21: mod_base = OTHER; note = 2'-O-methylcytidine-3'-phosphorothioate
  modified_base 22: mod_base = OTHER; note = 2'-O-methyladenosine-3'-phosphorothioate
  modified_base 23: mod_base = OTHER; note = 2'-O-methyladenosine
tttcaaggtagccaaggtggcaa

SEQ ID NO: 1462 - RNA, 23 nt, synthetic construct
  source 1..23: mol_type = other RNA
  modified_base 1: mod_base = OTHER; note = 2'-O-methyluridine-3'-phosphorothioate 5'-(E)-Vinylphosphonate
  modified_base 2: mod_base = OTHER; note = 2'-deoxy-2'-fluorouridine-3'-phosphorothioate
  modified_base 3: mod_base = OTHER; note = 2'-O-methylguanosine-3'-phosphate
  modified_base 4: mod_base = OTHER; note = 2'-O-methylguanosine-3'-phosphate
  modified_base 5: mod_base = OTHER; note = 2'-O-methyluridine-3'-phosphate
  modified_base 6: mod_base = OTHER; note = 2'-deoxy-2'-fluorouridine-3'-phosphate
  modified_base 7: mod_base = OTHER; note = 2'-O-methyluridine-3'-phosphate
  modified_base 8: mod_base = OTHER; note = 2'-deoxy-2'-fluorouridine-3'-phosphate
  modified_base 9: mod_base = OTHER; note = 2'-deoxy-2'-fluorocytidine-3'-phosphate
  modified_base 10: mod_base = OTHER; note = 2'-O-methyladenosine-3'-phosphate
  modified_base 11: mod_base = OTHER; note = 2'-O-methyladenosine-3'-phosphate
  modified_base 12: mod_base = OTHER; note = 2'-O-methylguanosine-3'-phosphate
  modified_base 13: mod_base = OTHER; note = 2'-O-methylguanosine-3'-phosphate
  modified_base 14: mod_base = OTHER; note = 2'-deoxy-2'-fluorouridine-3'-phosphate
  modified_base 15: mod_base = OTHER; note = 2'-O-methyladenosine-3'-phosphate
  modified_base 16: mod_base = OTHER; note = 2'-deoxy-2'-fluoroguanosine-3'-phosphate
  modified_base 17: mod_base = OTHER; note = 2'-O-methylcytidine-3'-phosphate
  modified_base 18: mod_base = OTHER; note = 2'-O-methylcytidine-3'-phosphate
  modified_base 19: mod_base = OTHER; note = 2'-O-methyladenosine-3'-phosphate
  modified_base 20: mod_base = OTHER; note = 2'-O-methyladenosine-3'-phosphate
  modified_base 21: mod_base = OTHER; note = 2'-O-methylguanosine-3'-phosphorothioate
  modified_base 22: mod_base = OTHER; note = 2'-O-methylguanosine-3'-phosphorothioate
  modified_base 23: mod_base = OTHER; note = 2'-O-methyluridine
ttggttttcaaggtagccaaggt

SEQ ID NO: 1463 - RNA, 23 nt, synthetic construct
  source 1..23: mol_type = other RNA
  modified_base 1: mod_base = OTHER; note = 2'-O-methyluridine-3'-phosphorothioate 5'-(E)-Vinylphosphonate
  modified_base 2: mod_base = OTHER; note = 2'-deoxy-2'-fluoroadenosine-3'-phosphorothioate
  modified_base 3: mod_base = OTHER; note = 2'-O-methylcytidine-3'-phosphate
  modified_base 4: mod_base = OTHER; note = 2'-O-methyluridine-3'-phosphate
  modified_base 5: mod_base = OTHER; note = 2'-O-methyluridine-3'-phosphate
  modified_base 6: mod_base = OTHER; note = 2'-deoxy-2'-fluoroguanosine-3'-phosphate
  modified_base 7: mod_base = OTHER; note = 2'-O-methylcytidine-3'-phosphate
  modified_base 8: mod_base = OTHER; note = 2'-deoxy-2'-fluorouridine-3'-phosphate
  modified_base 9: mod_base = OTHER; note = 2'-deoxy-2'-fluoroguanosine-3'-phosphate
  modified_base 10: mod_base = OTHER; note = 2'-O-methylguanosine-3'-phosphate
  modified_base 11: mod_base = OTHER; note = 2'-O-methyluridine-3'-phosphate
  modified_base 12: mod_base = OTHER; note = 2'-O-methyluridine-3'-phosphate
  modified_base 13: mod_base = OTHER; note = 2'-O-methyluridine-3'-phosphate
  modified_base 14: mod_base = OTHER; note = 2'-deoxy-2'-fluorouridine-3'-phosphate
  modified_base 15: mod_base = OTHER; note = 2'-O-methylcytidine-3'-phosphate
  modified_base 16: mod_base = OTHER; note = 2'-deoxy-2'-fluoroadenosine-3'-phosphate
  modified_base 17: mod_base = OTHER; note = 2'-O-methyladenosine-3'-phosphate
  modified_base 18: mod_base = OTHER; note = 2'-O-methylguanosine-3'-phosphate
  modified_base 19: mod_base = OTHER; note = 2'-O-methylguanosine-3'-phosphate
  modified_base 20: mod_base = OTHER; note = 2'-O-methyluridine-3'-phosphate
  modified_base 21: mod_base = OTHER; note = 2'-O-methyladenosine-3'-phosphorothioate
  modified_base 22: mod_base = OTHER; note = 2'-O-methylguanosine-3'-phosphorothioate
  modified_base 23: mod_base = OTHER; note = 2'-O-methylcytidine
tacttgctggttttcaaggtagc

SEQ ID NO: 1464 - RNA, 23 nt, synthetic construct
  source 1..23: mol_type = other RNA
  modified_base 1: mod_base = OTHER; note = 2'-O-methyluridine-3'-phosphorothioate 5'-(E)-Vinylphosphonate
  modified_base 2: mod_base = OTHER; note = 2'-deoxy-2'-fluoroadenosine-3'-phosphorothioate
  modified_base 3: mod_base = OTHER; note = 2'-O-methylguanosine-3'-phosphate
  modified_base 4: mod_base = OTHER; note = 2'-O-methyladenosine-3'-phosphate
  modified_base 5: mod_base = OTHER; note = 2'-O-methylguanosine-3'-phosphate
  modified_base 6: mod_base = OTHER; note = 2'-deoxy-2'-fluoroguanosine-3'-phosphate
  modified_base 7: mod_base = OTHER; note = 2'-O-methyluridine-3'-phosphate
  modified_base 8: mod_base = OTHER; note = 2'-deoxy-2'-fluoroguanosine-3'-phosphate
  modified_base 9: mod_base = OTHER; note = 2'-deoxy-2'-fluoroguanosine-3'-phosphate
  modified_base 10: mod_base = OTHER; note = 2'-O-methylguanosine-3'-phosphate
  modified_base 11: mod_base = OTHER; note = 2'-O-methyladenosine-3'-phosphate
  modified_base 12: mod_base = OTHER; note = 2'-O-methylcytidine-3'-phosphate
  modified_base 13: mod_base = OTHER; note = 2'-O-methyluridine-3'-phosphate
  modified_base 14: mod_base = OTHER; note = 2'-deoxy-2'-fluorouridine-3'-phosphate
  modified_base 15: mod_base = OTHER; note = 2'-O-methylguanosine-3'-phosphate
  modified_base 16: mod_base = OTHER; note = 2'-deoxy-2'-fluorocytidine-3'-phosphate
  modified_base 17: mod_base = OTHER; note = 2'-O-methyluridine-3'-phosphate
  modified_base 18: mod_base = OTHER; note = 2'-O-methylguanosine-3'-phosphate
  modified_base 19: mod_base = OTHER; note = 2'-O-methylguanosine-3'-phosphate
  modified_base 20: mod_base = OTHER; note = 2'-O-methyluridine-3'-phosphate
  modified_base 21: mod_base = OTHER; note = 2'-O-methyluridine-3'-phosphorothioate
  modified_base 22: mod_base = OTHER; note = 2'-O-methyluridine-3'-phosphorothioate
  modified_base 23: mod_base = OTHER; note = 2'-O-methyluridine
tagaggtgggacttgctggtttt

SEQ ID NO: 1465 - RNA, 23 nt, synthetic construct
  source 1..23: mol_type = other RNA
  modified_base 1: mod_base = OTHER; note = 2'-O-methyluridine-3'-phosphorothioate 5'-(E)-Vinylphosphonate
  modified_base 2: mod_base = OTHER; note = 2'-deoxy-2'-fluoroguanosine-3'-phosphorothioate
  modified_base 3: mod_base = OTHER; note = 2'-O-methylguanosine-3'-phosphate
  modified_base 4: mod_base = OTHER; note = 2'-O-methyladenosine-3'-phosphate
  modified_base 5: mod_base = OTHER; note = 2'-O-methyladenosine-3'-phosphate
  modified_base 6: mod_base = OTHER; note = 2'-deoxy-2'-fluoroguanosine-3'-phosphate
  modified_base 7: mod_base = OTHER; note = 2'-O-methyladenosine-3'-phosphate
  modified_base 8: mod_base = OTHER; note = 2'-deoxy-2'-fluorocytidine-3'-phosphate
  modified_base 9: mod_base = OTHER; note = 2'-deoxy-2'-fluoroadenosine-3'-phosphate
  modified_base 10: mod_base = OTHER; note = 2'-O-methylguanosine-3'-phosphate
  modified_base 11: mod_base = OTHER; note = 2'-O-methyladenosine-3'-phosphate
  modified_base 12: mod_base = OTHER; note = 2'-O-methylguanosine-3'-phosphate
  modified_base 13: mod_base = OTHER; note = 2'-O-methylguanosine-3'-phosphate
  modified_base 14: mod_base = OTHER; note = 2'-deoxy-2'-fluorouridine-3'-phosphate
  modified_base 15: mod_base = OTHER; note = 2'-O-methylguanosine-3'-phosphate
  modified_base 16: mod_base = OTHER; note = 2'-deoxy-2'-fluoroguanosine-3'-phosphate
  modified_base 17: mod_base = OTHER; note = 2'-O-methylguanosine-3'-phosphate
  modified_base 18: mod_base = OTHER; note = 2'-O-methyladenosine-3'-phosphate
  modified_base 19: mod_base = OTHER; note = 2'-O-methylcytidine-3'-phosphate
  modified_base 20: mod_base = OTHER; note = 2'-O-methyluridine-3'-phosphate
  modified_base 21: mod_base = OTHER; note = 2'-O-methyluridine-3'-phosphorothioate
  modified_base 22: mod_base = OTHER; note = 2'-O-methylguanosine-3'-phosphorothioate
  modified_base 23: mod_base = OTHER; note = 2'-O-methylcytidine
tggaagacagaggtgggacttgc

SEQ ID NO: 1466 - RNA, 23 nt, synthetic construct
  source 1..23: mol_type = other RNA
  modified_base 1: mod_base = OTHER; note = 2'-O-methyluridine-3'-phosphorothioate 5'-(E)-Vinylphosphonate
  modified_base 2: mod_base = OTHER; note = 2'-deoxy-2'-fluoroguanosine-3'-phosphorothioate
  modified_base 3: mod_base = OTHER; note = 2'-O-methyladenosine-3'-phosphate
  modified_base 4: mod_base = OTHER; note = 2'-O-methylcytidine-3'-phosphate
  modified_base 5: mod_base = OTHER; note = 2'-O-methyladenosine-3'-phosphate
  modified_base 6: mod_base = OTHER; note = 2'-deoxy-2'-fluorouridine-3'-phosphate
  modified_base 7: mod_base = OTHER; note = 2'-O-methylguanosine-3'-phosphate
  modified_base 8: mod_base = OTHER; note = 2'-deoxy-2'-fluoroguanosine-3'-phosphate
  modified_base 9: mod_base = OTHER; note = 2'-deoxy-2'-fluoroguanosine-3'-phosphate
  modified_base 10: mod_base = OTHER; note = 2'-O-methyladenosine-3'-phosphate
  modified_base 11: mod_base = OTHER; note = 2'-O-methyladenosine-3'-phosphate
  modified_base 12: mod_base = OTHER; note = 2'-O-methylguanosine-3'-phosphate
  modified_base 13: mod_base = OTHER; note = 2'-O-methyladenosine-3'-phosphate
  modified_base 14: mod_base = OTHER; note = 2'-deoxy-2'-fluorocytidine-3'-phosphate
  modified_base 15: mod_base = OTHER; note = 2'-O-methyladenosine-3'-phosphate
  modified_base 16: mod_base = OTHER; note = 2'-deoxy-2'-fluoroguanosine-3'-phosphate
  modified_base 17: mod_base = OTHER; note = 2'-O-methyladenosine-3'-phosphate
  modified_base 18: mod_base = OTHER; note = 2'-O-methylguanosine-3'-phosphate
  modified_base 19: mod_base = OTHER; note = 2'-O-methylguanosine-3'-phosphate
  modified_base 20: mod_base = OTHER; note = 2'-O-methyluridine-3'-phosphate
  modified_base 21: mod_base = OTHER; note = 2'-O-methylguanosine-3'-phosphorothioate
  modified_base 22: mod_base = OTHER; note = 2'-O-methylguanosine-3'-phosphorothioate
  modified_base 23: mod_base = OTHER; note = 2'-O-methylguanosine
tgacatgggaagacagaggtggg

SEQ ID NO: 1467 - RNA, 23 nt, synthetic construct
  source 1..23: mol_type = other RNA
  modified_base 1: mod_base = OTHER; note = 2'-O-methyluridine-3'-phosphorothioate 5'-(E)-Vinylphosphonate
  modified_base 2: mod_base = OTHER; note = 2'-deoxy-2'-fluoroguanosine-3'-phosphorothioate
  modified_base 3: mod_base = OTHER; note = 2'-O-methyladenosine-3'-phosphate
  modified_base 4: mod_base = OTHER; note = 2'-O-methylcytidine-3'-phosphate
  modified_base 5: mod_base = OTHER; note = 2'-O-methyluridine-3'-phosphate
  modified_base 6: mod_base = OTHER; note = 2'-deoxy-2'-fluoroguanosine-3'-phosphate
  modified_base 7: mod_base = OTHER; note = 2'-O-methylguanosine-3'-phosphate
  modified_base 8: mod_base = OTHER; note = 2'-deoxy-2'-fluoroadenosine-3'-phosphate
  modified_base 9: mod_base = OTHER; note = 2'-deoxy-2'-fluorocytidine-3'-phosphate
  modified_base 10: mod_base = OTHER; note = 2'-O-methyladenosine-3'-phosphate
  modified_base 11: mod_base = OTHER; note = 2'-O-methyluridine-3'-phosphate
  modified_base 12: mod_base = OTHER; note = 2'-O-methylguanosine-3'-phosphate
  modified_base 13: mod_base = OTHER; note = 2'-O-methylguanosine-3'-phosphate
  modified_base 14: mod_base = OTHER; note = 2'-deoxy-2'-fluoroguanosine-3'-phosphate
  modified_base 15: mod_base = OTHER; note = 2'-O-methyladenosine-3'-phosphate
  modified_base 16: mod_base = OTHER; note = 2'-deoxy-2'-fluoroadenosine-3'-phosphate
  modified_base 17: mod_base = OTHER; note = 2'-O-methylguanosine-3'-phosphate
  modified_base 18: mod_base = OTHER; note = 2'-O-methyladenosine-3'-phosphate
  modified_base 19: mod_base = OTHER; note = 2'-O-methylcytidine-3'-phosphate
  modified_base 20: mod_base = OTHER; note = 2'-O-methyladenosine-3'-phosphate
  modified_base 21: mod_base = OTHER; note = 2'-O-methylguanosine-3'-phosphorothioate
  modified_base 22: mod_base = OTHER; note = 2'-O-methyladenosine-3'-phosphorothioate
  modified_base 23: mod_base = OTHER; note = 2'-O-methylguanosine
tgactggacatgggaagacagag

SEQ ID NO: 1468 - RNA, 23 nt, synthetic construct
  source 1..23: mol_type = other RNA
  modified_base 1: mod_base = OTHER; note = 2'-O-methyluridine-3'-phosphorothioate 5'-(E)-Vinylphosphonate
  modified_base 2: mod_base = OTHER; note = 2'-deoxy-2'-fluoroadenosine-3'-phosphorothioate
  modified_base 3: mod_base = OTHER; note = 2'-O-methyladenosine-3'-phosphate
  modified_base 4: mod_base = OTHER; note = 2'-O-methyluridine-3'-phosphate
  modified_base 5: mod_base = OTHER; note = 2'-O-methylcytidine-3'-phosphate
  modified_base 6: mod_base = OTHER; note = 2'-deoxy-2'-fluoroadenosine-3'-phosphate
  modified_base 7: mod_base = OTHER; note = 2'-O-methylguanosine-3'-phosphate
  modified_base 8: mod_base = OTHER; note = 2'-deoxy-2'-fluoroadenosine-3'-phosphate
  modified_base 9: mod_base = OTHER; note = 2'-deoxy-2'-fluorocytidine-3'-phosphate
  modified_base 10: mod_base = OTHER; note = 2'-O-methyluridine-3'-phosphate
  modified_base 11: mod_base = OTHER; note = 2'-O-methylguanosine-3'-phosphate
  modified_base 12: mod_base = OTHER; note = 2'-O-methylguanosine-3'-phosphate
  modified_base 13: mod_base = OTHER; note = 2'-O-methyladenosine-3'-phosphate
  modified_base 14: mod_base = OTHER; note = 2'-deoxy-2'-fluorocytidine-3'-phosphate
  modified_base 15: mod_base = OTHER; note = 2'-O-methyladenosine-3'-phosphate
  modified_base 16: mod_base = OTHER; note = 2'-deoxy-2'-fluorouridine-3'-phosphate
  modified_base 17: mod_base = OTHER; note = 2'-O-methylguanosine-3'-phosphate
  modified_base 18: mod_base = OTHER; note = 2'-O-methylguanosine-3'-phosphate
  modified_base 19: mod_base = OTHER; note = 2'-O-methylguanosine-3'-phosphate
  modified_base 20: mod_base = OTHER; note = 2'-O-methyladenosine-3'-phosphate
  modified_base 21: mod_base = OTHER; note = 2'-O-methyladenosine-3'-phosphorothioate
  modified_base 22: mod_base = OTHER; note = 2'-O-methylguanosine-3'-phosphorothioate
  modified_base 23: mod_base = OTHER; note = 2'-O-methyladenosine
taatcagactggacatgggaaga

SEQ ID NO: 1469 - RNA, 23 nt, synthetic construct
  source 1..23: mol_type = other RNA
  modified_base 1: mod_base = OTHER; note = 2'-O-methyluridine-3'-phosphorothioate 5'-(E)-Vinylphosphonate
  modified_base 2: mod_base = OTHER; note = 2'-deoxy-2'-fluorouridine-3'-phosphorothioate
  modified_base 3: mod_base = OTHER; note = 2'-O-methyluridine-3'-phosphate
  modified_base 4: mod_base = OTHER; note = 2'-O-methyluridine-3'-phosphate
  modified_base 5: mod_base = OTHER; note = 2'-O-methyluridine-3'-phosphate
  modified_base 6: mod_base = OTHER; note = 2'-deoxy-2'-fluorocytidine-3'-phosphate
  modified_base 7: mod_base = OTHER; note = 2'-O-methylcytidine-3'-phosphate
  modified_base 8: mod_base = OTHER; note = 2'-deoxy-2'-fluoroadenosine-3'-phosphate
  modified_base 9: mod_base = OTHER; note = 2'-deoxy-2'-fluoroguanosine-3'-phosphate
  modified_base 10: mod_base = OTHER; note = 2'-O-methylcytidine-3'-phosphate
  modified_base 11: mod_base = OTHER; note = 2'-O-methyladenosine-3'-phosphate
  modified_base 12: mod_base = OTHER; note = 2'-O-methyladenosine-3'-phosphate
  modified_base 13: mod_base = OTHER; note = 2'-O-methyluridine-3'-phosphate
  modified_base 14: mod_base = OTHER; note = 2'-deoxy-2'-fluorocytidine-3'-phosphate
  modified_base 15: mod_base = OTHER; note = 2'-O-methyladenosine-3'-phosphate
  modified_base 16: mod_base = OTHER; note = 2'-deoxy-2'-fluoroguanosine-3'-phosphate
  modified_base 17: mod_base = OTHER; note = 2'-O-methyladenosine-3'-phosphate
  modified_base 18: mod_base = OTHER; note = 2'-O-methylcytidine-3'-phosphate
  modified_base 19: mod_base = OTHER; note = 2'-O-methyluridine-3'-phosphate
  modified_base 20: mod_base = OTHER; note = 2'-O-methylguanosine-3'-phosphate
  modified_base 21: mod_base = OTHER; note = 2'-O-methylguanosine-3'-phosphorothioate
  modified_base 22: mod_base = OTHER; note = 2'-O-methyladenosine-3'-phosphorothioate
  modified_base 23: mod_base = OTHER; note = 2'-O-methylcytidine
tttttccagcaatcagactggac

SEQ ID NO: 1470 - RNA, 23 nt, synthetic construct
  source 1..23: mol_type = other RNA
  modified_base 1: mod_base = OTHER; note = 2'-O-methyluridine-3'-phosphorothioate 5'-(E)-Vinylphosphonate
  modified_base 2: mod_base = OTHER; note = 2'-deoxy-2'-fluorouridine-3'-phosphorothioate
  modified_base 3: mod_base = OTHER; note = 2'-O-methyluridine-3'-phosphate
  modified_base 4: mod_base = OTHER; note = 2'-O-methyluridine-3'-phosphate
  modified_base 5: mod_base = OTHER; note = 2'-O-methylcytidine-3'-phosphate
  modified_base 6: mod_base = OTHER; note = 2'-deoxy-2'-fluorocytidine-3'-phosphate
  modified_base 7: mod_base = OTHER; note = 2'-O-methylcytidine-3'-phosphate
  modified_base 8: mod_base = OTHER; note = 2'-deoxy-2'-fluorouridine-3'-phosphate
  modified_base 9: mod_base = OTHER; note = 2'-deoxy-2'-fluorouridine-3'-phosphate
  modified_base 10: mod_base = OTHER; note = 2'-O-methyluridine-3'-phosphate
  modified_base 11: mod_base = OTHER; note = 2'-O-methyluridine-3'-phosphate
  modified_base 12: mod_base = OTHER; note = 2'-O-methylcytidine-3'-phosphate
  modified_base 13: mod_base = OTHER; note = 2'-O-methylcytidine-3'-phosphate
  modified_base 14: mod_base = OTHER; note = 2'-deoxy-2'-fluoroadenosine-3'-phosphate
  modified_base 15: mod_base = OTHER; note = 2'-O-methylguanosine-3'-phosphate
  modified_base 16: mod_base = OTHER; note = 2'-deoxy-2'-fluorocytidine-3'-phosphate
  modified_base 17: mod_base = OTHER; note = 2'-O-methyladenosine-3'-phosphate
  modified_base 18: mod_base = OTHER; note = 2'-O-methyladenosine-3'-phosphate
  modified_base 19: mod_base = OTHER; note = 2'-O-methyluridine-3'-phosphate
  modified_base 20: mod_base = OTHER; note = 2'-O-methylcytidine-3'-phosphate
  modified_base 21: mod_base = OTHER; note = 2'-O-methyladenosine-3'-phosphorothioate
  modified_base 22: mod_base = OTHER; note = 2'-O-methylguanosine-3'-phosphorothioate
  modified_base 23: mod_base = OTHER; note = 2'-O-methyladenosine
ttttcccttttccagcaatcaga

SEQ ID NO: 1471 - RNA, 23 nt, synthetic construct
  source 1..23: mol_type = other RNA
  modified_base 1: mod_base = OTHER; note = 2'-O-methyluridine-3'-phosphorothioate 5'-(E)-Vinylphosphonate
  modified_base 2: mod_base = OTHER; note = 2'-deoxy-2'-fluoroadenosine-3'-phosphorothioate
  modified_base 3: mod_base = OTHER; note = 2'-O-methyladenosine-3'-phosphate
  modified_base 4: mod_base = OTHER; note = 2'-O-methyluridine-3'-phosphate
  modified_base 5: mod_base = OTHER; note = 2'-O-methylguanosine-3'-phosphate
  modified_base 6: mod_base = OTHER; note = 2'-deoxy-2'-fluoroguanosine-3'-phosphate
  modified_base 7: mod_base = OTHER; note = 2'-O-methylcytidine-3'-phosphate
  modified_base 8: mod_base = OTHER; note = 2'-deoxy-2'-fluorouridine-3'-phosphate
  modified_base 9: mod_base = OTHER; note = 2'-deoxy-2'-fluorouridine-3'-phosphate
  modified_base 10: mod_base = OTHER; note = 2'-O-methyluridine-3'-phosphate
  modified_base 11: mod_base = OTHER; note = 2'-O-methylcytidine-3'-phosphate
  modified_base 12: mod_base = OTHER; note = 2'-O-methylcytidine-3'-phosphate
  modified_base 13: mod_base = OTHER; note = 2'-O-methylcytidine-3'-phosphate
  modified_base 14: mod_base = OTHER; note = 2'-deoxy-2'-fluorouridine-3'-phosphate
  modified_base 15: mod_base = OTHER; note = 2'-O-methyluridine-3'-phosphate
  modified_base 16: mod_base = OTHER; note = 2'-deoxy-2'-fluorouridine-3'-phosphate
  modified_base 17: mod_base = OTHER; note = 2'-O-methyluridine-3'-phosphate
  modified_base 18: mod_base = OTHER; note = 2'-O-methylcytidine-3'-phosphate
  modified_base 19: mod_base = OTHER; note = 2'-O-methylcytidine-3'-phosphate
  modified_base 20: mod_base = OTHER; note = 2'-O-methyladenosine-3'-phosphate
  modified_base 21: mod_base = OTHER; note = 2'-O-methylguanosine-3'-phosphorothioate
  modified_base 22: mod_base = OTHER; note = 2'-O-methylcytidine-3'-phosphorothioate
  modified_base 23: mod_base = OTHER; note = 2'-O-methyladenosine
taatggctttcccttttccagca

SEQ ID NO: 1472 - RNA, 23 nt, synthetic construct
  source 1..23: mol_type = other RNA
  modified_base 1: mod_base = OTHER; note = 2'-O-methyluridine-3'-phosphorothioate 5'-(E)-Vinylphosphonate
  modified_base 2: mod_base = OTHER; note = 2'-deoxy-2'-fluoroadenosine-3'-phosphorothioate
  modified_base 3: mod_base = OTHER; note = 2'-O-methylguanosine-3'-phosphate
  modified_base 4: mod_base = OTHER; note = 2'-O-methyladenosine-3'-phosphate
  modified_base 5: mod_base = OTHER; note = 2'-O-methylcytidine-3'-phosphate
  modified_base 6: mod_base = OTHER; note = 2'-deoxy-2'-fluoroadenosine-3'-phosphate
  modified_base 7: mod_base = OTHER; note = 2'-O-methyladenosine-3'-phosphate
  modified_base 8: mod_base = OTHER; note = 2'-deoxy-2'-fluoroadenosine-3'-phosphate
  modified_base 9: mod_base = OTHER; note = 2'-deoxy-2'-fluoroadenosine-3'-phosphate
  modified_base 10: mod_base = OTHER; note = 2'-O-methyluridine-3'-phosphate
  modified_base 11: mod_base = OTHER; note = 2'-O-methylguanosine-3'-phosphate
  modified_base 12: mod_base = OTHER; note = 2'-O-methylguanosine-3'-phosphate
  modified_base 13: mod_base = OTHER; note = 2'-O-methylcytidine-3'-phosphate
  modified_base 14: mod_base = OTHER; note = 2'-deoxy-2'-fluorouridine-3'-phosphate
  modified_base 15: mod_base = OTHER; note = 2'-O-methyluridine-3'-phosphate
  modified_base 16: mod_base = OTHER; note = 2'-deoxy-2'-fluorouridine-3'-phosphate
  modified_base 17: mod_base = OTHER; note = 2'-O-methylcytidine-3'-phosphate
  modified_base 18: mod_base = OTHER; note = 2'-O-methylcytidine-3'-phosphate
  modified_base 19: mod_base = OTHER; note = 2'-O-methylcytidine-3'-phosphate
  modified_base 20: mod_base = OTHER; note = 2'-O-methyluridine-3'-phosphate
  modified_base 21: mod_base = OTHER; note = 2'-O-methyluridine-3'-phosphorothioate
  modified_base 22: mod_base = OTHER; note = 2'-O-methyluridine-3'-phosphorothioate
  modified_base 23: mod_base = OTHER; note = 2'-O-methyluridine
tagacaaaatggctttccctttt

SEQ ID NO: 1473 - RNA, 23 nt, synthetic construct
  source 1..23: mol_type = other RNA
  modified_base 1: mod_base = OTHER; note = 2'-O-methyluridine-3'-phosphorothioate 5'-(E)-Vinylphosphonate
  modified_base 2: mod_base = OTHER; note = 2'-deoxy-2'-fluorocytidine-3'-phosphorothioate
  modified_base 3: mod_base = OTHER; note = 2'-O-methyladenosine-3'-phosphate
  modified_base 4: mod_base = OTHER; note = 2'-O-methyluridine-3'-phosphate
  modified_base 5: mod_base = OTHER; note = 2'-O-methyladenosine-3'-phosphate
  modified_base 6: mod_base = OTHER; note = 2'-deoxy-2'-fluoroguanosine-3'-phosphate
  modified_base 7: mod_base = OTHER; note = 2'-O-methyladenosine-3'-phosphate
  modified_base 8: mod_base = OTHER; note = 2'-deoxy-2'-fluoroguanosine-3'-phosphate
  modified_base 9: mod_base = OTHER; note = 2'-deoxy-2'-fluoroadenosine-3'-phosphate
  modified_base 10: mod_base = OTHER; note = 2'-O-methylguanosine-3'-phosphate
  modified_base 11: mod_base = OTHER; note = 2'-O-methyladenosine-3'-phosphate
  modified_base 12: mod_base = OTHER; note = 2'-O-methylcytidine-3'-phosphate
  modified_base 13: mod_base = OTHER; note = 2'-O-methyladenosine-3'-phosphate
  modified_base 14: mod_base = OTHER; note = 2'-deoxy-2'-fluoroadenosine-3'-phosphate
  modified_base 15: mod_base = OTHER; note = 2'-O-methyladenosine-3'-phosphate
  modified_base 16: mod_base = OTHER; note = 2'-deoxy-2'-fluoroadenosine-3'-phosphate
  modified_base 17: mod_base = OTHER; note = 2'-O-methyluridine-3'-phosphate
  modified_base 18: mod_base = OTHER; note = 2'-O-methylguanosine-3'-phosphate
  modified_base 19: mod_base = OTHER; note = 2'-O-methylguanosine-3'-phosphate
  modified_base 20: mod_base = OTHER; note = 2'-O-methylcytidine-3'-phosphate
  modified_base 21: mod_base = OTHER; note = 2'-O-methyluridine-3'-phosphorothioate
  modified_base 22: mod_base = OTHER; note = 2'-O-methyluridine-3'-phosphorothioate
  modified_base 23: mod_base = OTHER; note = 2'-O-methyluridine
tcatagagagacaaaatggcttt

SEQ ID NO: 1474 - RNA, 23 nt, synthetic construct
  source 1..23: mol_type = other RNA
  modified_base 1: mod_base = OTHER; note = 2'-O-methyluridine-3'-phosphorothioate 5'-(E)-Vinylphosphonate
  modified_base 2: mod_base = OTHER; note = 2'-deoxy-2'-fluoroguanosine-3'-phosphorothioate
  modified_base 3: mod_base = OTHER; note = 2'-O-methyladenosine-3'-phosphate
  modified_base 4: mod_base = OTHER; note = 2'-O-methylcytidine-3'-phosphate
  modified_base 5: mod_base = OTHER; note = 2'-O-methylcytidine-3'-phosphate
  modified_base 6: mod_base = OTHER; note = 2'-deoxy-2'-fluoroadenosine-3'-phosphate
  modified_base 7: mod_base = OTHER; note = 2'-O-methylcytidine-3'-phosphate
  modified_base 8: mod_base = OTHER; note = 2'-deoxy-2'-fluoroadenosine-3'-phosphate
  modified_base 9: mod_base = OTHER; note = 2'-deoxy-2'-fluorouridine-3'-phosphate
  modified_base 10: mod_base = OTHER; note = 2'-O-methyladenosine-3'-phosphate
  modified_base 11: mod_base = OTHER; note = 2'-O-methylguanosine-3'-phosphate
  modified_base 12: mod_base = OTHER; note = 2'-O-methyladenosine-3'-phosphate
  modified_base 13: mod_base = OTHER; note = 2'-O-methylguanosine-3'-phosphate
  modified_base 14: mod_base = OTHER; note = 2'-deoxy-2'-fluoroadenosine-3'-phosphate
  modified_base 15: mod_base = OTHER; note = 2'-O-methylguanosine-3'-phosphate
  modified_base 16: mod_base = OTHER; note = 2'-deoxy-2'-fluoroadenosine-3'-phosphate
  modified_base 17: mod_base = OTHER; note = 2'-O-methylcytidine-3'-phosphate
  modified_base 18: mod_base = OTHER; note = 2'-O-methyladenosine-3'-phosphate
  modified_base 19: mod_base = OTHER; note = 2'-O-methyladenosine-3'-phosphate
  modified_base 20: mod_base = OTHER; note = 2'-O-methyladenosine-3'-phosphate
  modified_base 21: mod_base = OTHER; note = 2'-O-methyladenosine-3'-phosphorothioate
  modified_base 22: mod_base = OTHER; note = 2'-O-methyluridine-3'-phosphorothioate
  modified_base 23: mod_base = OTHER; note = 2'-O-methylguanosine
tgaccacatagagagacaaaatg

SEQ ID NO: 1475 - RNA, 23 nt, synthetic construct
  source 1..23: mol_type = other RNA
  modified_base 1: mod_base = OTHER; note = 2'-O-methyluridine-3'-phosphorothioate 5'-(E)-Vinylphosphonate
  modified_base 2: mod_base = OTHER; note = 2'-deoxy-2'-fluoroadenosine-3'-phosphorothioate
  modified_base 3: mod_base = OTHER; note = 2'-O-methyladenosine-3'-phosphate
  modified_base 4: mod_base = OTHER; note = 2'-O-methylguanosine-3'-phosphate
  modified_base 5: mod_base = OTHER; note = 2'-O-methyluridine-3'-phosphate
  modified_base 6: mod_base = OTHER; note = 2'-deoxy-2'-fluorocytidine-3'-phosphate
  modified_base 7: mod_base = OTHER; note = 2'-O-methylguanosine-3'-phosphate
  modified_base 8: mod_base = OTHER; note = 2'-deoxy-2'-fluoroadenosine-3'-phosphate
  modified_base 9: mod_base = OTHER; note = 2'-deoxy-2'-fluorocytidine-3'-phosphate
  modified_base 10: mod_base = OTHER; note = 2'-O-methylcytidine-3'-phosphate
  modified_base 11: mod_base = OTHER; note = 2'-O-methyladenosine-3'-phosphate
  modified_base 12: mod_base = OTHER; note = 2'-O-methylcytidine-3'-phosphate
  modified_base 13: mod_base = OTHER; note = 2'-O-methyladenosine-3'-phosphate
  modified_base 14: mod_base = OTHER; note = 2'-deoxy-2'-fluorouridine-3'-phosphate
  modified_base 15: mod_base = OTHER; note = 2'-O-methyladenosine-3'-phosphate
  modified_base 16: mod_base = OTHER; note = 2'-deoxy-2'-fluoroguanosine-3'-phosphate
  modified_base 17: mod_base = OTHER; note = 2'-O-methyladenosine-3'-phosphate
  modified_base 18: mod_base = OTHER; note = 2'-O-methylguanosine-3'-phosphate
  modified_base 19: mod_base = OTHER; note = 2'-O-methyladenosine-3'-phosphate
  modified_base 20: mod_base = OTHER; note = 2'-O-methylguanosine-3'-phosphate
  modified_base 21: mod_base = OTHER; note = 2'-O-methyladenosine-3'-phosphorothioate
  modified_base 22: mod_base = OTHER; note = 2'-O-methylcytidine-3'-phosphorothioate
  modified_base 23: mod_base = OTHER; note = 2'-O-methyladenosine
taagtcgaccacatagagagaca

SEQ ID NO: 1476 - RNA, 23 nt, synthetic construct
  source 1..23: mol_type = other RNA
  modified_base 1: mod_base = OTHER; note = 2'-O-methyluridine-3'-phosphorothioate 5'-(E)-Vinylphosphonate
  modified_base 2: mod_base = OTHER; note = 2'-deoxy-2'-fluoroadenosine-3'-phosphorothioate
  modified_base 3: mod_base = OTHER; note = 2'-O-methylguanosine-3'-phosphate
  modified_base 4: mod_base = OTHER; note = 2'-O-methyladenosine-3'-phosphate
  modified_base 5: mod_base = OTHER; note = 2'-O-methyladenosine-3'-phosphate
  modified_base 6: mod_base = OTHER; note = 2'-deoxy-2'-fluoroguanosine-3'-phosphate
  modified_base 7: mod_base = OTHER; note = 2'-O-methylguanosine-3'-phosphate
  modified_base 8: mod_base = OTHER; note = 2'-deoxy-2'-fluorouridine-3'-phosphate
  modified_base 9: mod_base = OTHER; note = 2'-deoxy-2'-fluoroguanosine-3'-phosphate
  modified_base 10: mod_base = OTHER; note = 2'-O-methyladenosine-3'-phosphate
  modified_base 11: mod_base = OTHER; note = 2'-O-methyladenosine-3'-phosphate
  modified_base 12: mod_base = OTHER; note = 2'-O-methylguanosine-3'-phosphate
  modified_base 13: mod_base = OTHER; note = 2'-O-methyluridine-3'-phosphate
  modified_base 14: mod_base = OTHER; note = 2'-deoxy-2'-fluorocytidine-3'-phosphate
  modified_base 15: mod_base = OTHER; note = 2'-O-methylguanosine-3'-phosphate
  modified_base 16: mod_base = OTHER; note = 2'-deoxy-2'-fluoroadenosine-3'-phosphate
  modified_base 17: mod_base = OTHER; note = 2'-O-methylcytidine-3'-phosphate
  modified_base 18: mod_base = OTHER; note = 2'-O-methylcytidine-3'-phosphate
  modified_base 19: mod_base = OTHER; note = 2'-O-methyladenosine-3'-phosphate
  modified_base 20: mod_base = OTHER; note = 2'-O-methylcytidine-3'-phosphate
  modified_base 21: mod_base = OTHER; note = 2'-O-methyladenosine-3'-phosphorothioate
  modified_base 22: mod_base = OTHER; note = 2'-O-methyluridine-3'-phosphorothioate
  modified_base 23: mod_base = OTHER; note = 2'-O-methyladenosine
tagaaggtgaagtcgaccacata

SEQ ID NO: 1477 - RNA, 23 nt, synthetic construct
  source 1..23: mol_type = other RNA
  modified_base 1: mod_base = OTHER; note = 2'-O-methyluridine-3'-phosphorothioate 5'-(E)-Vinylphosphonate
  modified_base 2: mod_base = OTHER; note = 2'-deoxy-2'-fluorocytidine-3'-phosphorothioate
  modified_base 3: mod_base = OTHER; note = 2'-O-methyladenosine-3'-phosphate
  modified_base 4: mod_base = OTHER; note = 2'-O-methyladenosine-3'-phosphate
  modified_base 5: mod_base = OTHER; note = 2'-O-methylcytidine-3'-phosphate
  modified_base 6: mod_base = OTHER; note = 2'-deoxy-2'-fluoroadenosine-3'-phosphate
  modified_base 7: mod_base = OTHER; note = 2'-O-methylcytidine-3'-phosphate
  modified_base 8: mod_base = OTHER; note = 2'-deoxy-2'-fluoroadenosine-3'-phosphate
  modified_base 9: mod_base = OTHER; note = 2'-deoxy-2'-fluoroguanosine-3'-phosphate
  modified_base 10: mod_base = OTHER; note = 2'-O-methyladenosine-3'-phosphate
  modified_base 11: mod_base = OTHER; note = 2'-O-methyladenosine-3'-phosphate
  modified_base 12: mod_base = OTHER; note = 2'-O-methylguanosine-3'-phosphate
  modified_base 13: mod_base = OTHER; note = 2'-O-methylguanosine-3'-phosphate
  modified_base 14: mod_base = OTHER; note = 2'-deoxy-2'-fluorouridine-3'-phosphate
  modified_base 15: mod_base = OTHER; note = 2'-O-methylguanosine-3'-phosphate
  modified_base 16: mod_base = OTHER; note = 2'-deoxy-2'-fluoroadenosine-3'-phosphate
  modified_base 17: mod_base = OTHER; note = 2'-O-methyladenosine-3'-phosphate
  modified_base 18: mod_base = OTHER; note = 2'-O-methylguanosine-3'-phosphate
  modified_base 19: mod_base = OTHER; note = 2'-O-methyluridine-3'-phosphate
  modified_base 20: mod_base = OTHER; note = 2'-O-methylcytidine-3'-phosphate
  modified_base 21: mod_base = OTHER; note = 2'-O-methylguanosine-3'-phosphorothioate
  modified_base 22: mod_base = OTHER; note = 2'-O-methyladenosine-3'-phosphorothioate
  modified_base 23: mod_base = OTHER; note = 2'-O-methylcytidine
tcaacacagaaggtgaagtcgac

SEQ ID NO: 1478 - RNA, 23 nt, synthetic construct
  source 1..23: mol_type = other RNA
  modified_base 1: mod_base = OTHER; note = 2'-O-methyluridine-3'-phosphorothioate 5'-(E)-Vinylphosphonate
  modified_base 2: mod_base = OTHER; note = 2'-deoxy-2'-fluoroadenosine-3'-phosphorothioate
  modified_base 3: mod_base = OTHER; note = 2'-O-methylcytidine-3'-phosphate
  modified_base 4: mod_base = OTHER; note = 2'-O-methylcytidine-3'-phosphate
  modified_base 5: mod_base = OTHER; note = 2'-O-methyladenosine-3'-phosphate
  modified_base 6: mod_base = OTHER; note = 2'-deoxy-2'-fluorocytidine-3'-phosphate
  modified_base 7: mod_base = OTHER; note = 2'-O-methyladenosine-3'-phosphate
  modified_base 8: mod_base = OTHER; note = 2'-deoxy-2'-fluoroguanosine-3'-phosphate
  modified_base 9: mod_base = OTHER; note = 2'-deoxy-2'-fluorocytidine-3'-phosphate
  modified_base 10: mod_base = OTHER; note = 2'-O-methyladenosine-3'-phosphate
  modified_base 11: mod_base = OTHER; note = 2'-O-methyladenosine-3'-phosphate
  modified_base 12: mod_base = OTHER; note = 2'-O-methylcytidine-3'-phosphate
  modified_base 13: mod_base = OTHER; note = 2'-O-methyladenosine-3'-phosphate
  modified_base 14: mod_base = OTHER; note = 2'-deoxy-2'-fluorocytidine-3'-phosphate
  modified_base 15: mod_base = OTHER; note = 2'-O-methyladenosine-3'-phosphate
  modified_base 16: mod_base = OTHER; note = 2'-deoxy-2'-fluoroguanosine-3'-phosphate
  modified_base 17: mod_base = OTHER; note = 2'-O-methyladenosine-3'-phosphate
  modified_base 18: mod_base = OTHER; note = 2'-O-methyladenosine-3'-phosphate
  modified_base 19: mod_base = OTHER; note = 2'-O-methylguanosine-3'-phosphate
  modified_base 20: mod_base = OTHER; note = 2'-O-methylguanosine-3'-phosphate
  modified_base 21: mod_base = OTHER; note = 2'-O-methyluridine-3'-phosphorothioate
  modified_base 22: mod_base = OTHER; note = 2'-O-methylguanosine-3'-phosphorothioate
  modified_base 23: mod_base = OTHER; note = 2'-O-methyladenosine
taccacagcaacacagaaggtga

SEQ ID NO: 1479 - RNA, 23 nt, synthetic construct
  source 1..23: mol_type = other RNA
  modified_base 1: mod_base = OTHER; note = 2'-O-methyluridine-3'-phosphorothioate 5'-(E)-Vinylphosphonate
  modified_base 2: mod_base = OTHER; note = 2'-deoxy-2'-fluoroadenosine-3'-phosphorothioate
  modified_base 3: mod_base = OTHER; note = 2'-O-methylguanosine-3'-phosphate
  modified_base 4: mod_base = OTHER; note = 2'-O-methyladenosine-3'-phosphate
  modified_base 5: mod_base = OTHER; note = 2'-O-methylcytidine-3'-phosphate
  modified_base 6: mod_base = OTHER; note = 2'-deoxy-2'-fluoroadenosine-3'-phosphate
  modified_base 7: mod_base = OTHER; note = 2'-O-methylguanosine-3'-phosphate
  modified_base 8: mod_base = OTHER; note = 2'-deoxy-2'-fluoroadenosine-3'-phosphate
  modified_base 9: mod_base = OTHER; note = 2'-deoxy-2'-fluoroguanosine-3'-phosphate
  modified_base 10: mod_base = OTHER; note = 2'-O-methyladenosine-3'-phosphate
  modified_base 11: mod_base = OTHER; note = 2'-O-methylcytidine-3'-phosphate
  modified_base 12: mod_base = OTHER; note = 2'-O-methylcytidine-3'-phosphate
  modified_base 13: mod_base = OTHER; note = 2'-O-methyladenosine-3'-phosphate
  modified_base 14: mod_base = OTHER; note = 2'-deoxy-2'-fluorocytidine-3'-phosphate
  modified_base 15: mod_base = OTHER; note = 2'-O-methyladenosine-3'-phosphate
  modified_base 16: mod_base = OTHER; note = 2'-deoxy-2'-fluoroguanosine-3'-phosphate
  modified_base 17: mod_base = OTHER; note = 2'-O-methylcytidine-3'-phosphate
  modified_base 18: mod_base = OTHER; note = 2'-O-methyladenosine-3'-phosphate
  modified_base 19: mod_base = OTHER; note = 2'-O-methyladenosine-3'-phosphate
  modified_base 20: mod_base = OTHER; note = 2'-O-methylcytidine-3'-phosphate
  modified_base 21: mod_base = OTHER; note = 2'-O-methyladenosine-3'-phosphorothioate
  modified_base 22: mod_base = OTHER; note = 2'-O-methylcytidine-3'-phosphorothioate
  modified_base 23: mod_base = OTHER; note = 2'-O-methyladenosine
tagacagagaccacagcaacaca

SEQ ID NO: 1480 - RNA, 23 nt, synthetic construct
  source 1..23: mol_type = other RNA
  modified_base 1: mod_base = OTHER; note = 2'-O-methyluridine-3'-phosphorothioate 5'-(E)-Vinylphosphonate
  modified_base 2: mod_base = OTHER; note = 2'-deoxy-2'-fluorouridine-3'-phosphorothioate
  modified_base 3: mod_base = OTHER; note = 2'-O-methylguanosine-3'-phosphate
  modified_base 4: mod_base = OTHER; note = 2'-O-methyluridine-3'-phosphate
  modified_base 5: mod_base = OTHER; note = 2'-O-methyladenosine-3'-phosphate
  modified_base 6: mod_base = OTHER; note = 2'-deoxy-2'-fluoroadenosine-3'-phosphate
  modified_base 7: mod_base = OTHER; note = 2'-O-methylguanosine-3'-phosphate
  modified_base 8: mod_base = OTHER; note = 2'-deoxy-2'-fluoroadenosine-3'-phosphate
  modified_base 9: mod_base = OTHER; note = 2'-deoxy-2'-fluoroguanosine-3'-phosphate
  modified_base 10: mod_base = OTHER; note = 2'-O-methyladenosine-3'-phosphate
  modified_base 11: mod_base = OTHER; note = 2'-O-methylcytidine-3'-phosphate
  modified_base 12: mod_base = OTHER; note = 2'-O-methyladenosine-3'-phosphate
  modified_base 13: mod_base = OTHER; note = 2'-O-methylguanosine-3'-phosphate
  modified_base 14: mod_base = OTHER; note = 2'-deoxy-2'-fluoroadenosine-3'-phosphate
  modified_base 15: mod_base = OTHER; note = 2'-O-methylguanosine-3'-phosphate
  modified_base 16: mod_base = OTHER; note = 2'-deoxy-2'-fluoroadenosine-3'-phosphate
  modified_base 17: mod_base = OTHER; note = 2'-O-methylcytidine-3'-phosphate
  modified_base 18: mod_base = OTHER; note = 2'-O-methylcytidine-3'-phosphate
  modified_base 19: mod_base = OTHER; note = 2'-O-methyladenosine-3'-phosphate
  modified_base 20: mod_base = OTHER; note = 2'-O-methylcytidine-3'-phosphate
  modified_base 21: mod_base = OTHER; note = 2'-O-methyladenosine-3'-phosphorothioate
  modified_base 22: mod_base = OTHER; note = 2'-O-methylguanosine-3'-phosphorothioate
  modified_base 23: mod_base = OTHER; note = 2'-O-methylcytidine
ttgtaagagacagagaccacagc

SEQ ID NO: 1481 - RNA, 23 nt, synthetic construct
  source 1..23: mol_type = other RNA
  modified_base 1: mod_base = OTHER; note = 2'-O-methyluridine-3'-phosphorothioate 5'-(E)-Vinylphosphonate
  modified_base 2: mod_base = OTHER; note = 2'-deoxy-2'-fluorocytidine-3'-phosphorothioate
  modified_base 3: mod_base = OTHER; note = 2'-O-methyladenosine-3'-phosphate
  modified_base 4: mod_base = OTHER; note = 2'-O-methyluridine-3'-phosphate
  modified_base 5: mod_base = OTHER; note = 2'-O-methylguanosine-3'-phosphate
  modified_base 6: mod_base = OTHER; note = 2'-deoxy-2'-fluoroadenosine-3'-phosphate
  modified_base 7: mod_base = OTHER; note = 2'-O-methyluridine-3'-phosphate
  modified_base 8: mod_base = OTHER; note = 2'-deoxy-2'-fluoroguanosine-3'-phosphate
  modified_base 9: mod_base = OTHER; note = 2'-deoxy-2'-fluorouridine-3'-phosphate
  modified_base 10: mod_base = OTHER; note = 2'-O-methyladenosine-3'-phosphate
  modified_base 11: mod_base = OTHER; note = 2'-O-methyladenosine-3'-phosphate
  modified_base 12: mod_base = OTHER; note = 2'-O-methylguanosine-3'-phosphate
  modified_base 13: mod_base = OTHER; note = 2'-O-methyladenosine-3'-phosphate
  modified_base 14: mod_base = OTHER; note = 2'-deoxy-2'-fluoroguanosine-3'-phosphate
  modified_base 15: mod_base = OTHER; note = 2'-O-methyladenosine-3'-phosphate
  modified_base 16: mod_base = OTHER; note = 2'-deoxy-2'-fluorocytidine-3'-phosphate
  modified_base 17: mod_base = OTHER; note = 2'-O-methyladenosine-3'-phosphate
  modified_base 18: mod_base = OTHER; note = 2'-O-methylguanosine-3'-phosphate
  modified_base 19: mod_base = OTHER; note = 2'-O-methyladenosine-3'-phosphate
  modified_base 20: mod_base = OTHER; note = 2'-O-methylguanosine-3'-phosphate
  modified_base 21: mod_base = OTHER; note = 2'-O-methyladenosine-3'-phosphorothioate
  modified_base 22: mod_base = OTHER; note = 2'-O-methylcytidine-3'-phosphorothioate
  modified_base 23: mod_base = OTHER; note = 2'-O-methylcytidine
tcatgatgtaagagacagagacc

SEQ ID NO: 1482 - RNA, 23 nt, synthetic construct
  source 1..23: mol_type = other RNA
  modified_base 1: mod_base = OTHER; note = 2'-O-methyluridine-3'-phosphorothioate 5'-(E)-Vinylphosphonate
  modified_base 2: mod_base = OTHER; note = 2'-deoxy-2'-fluorouridine-3'-phosphorothioate
  modified_base 3: mod_base = OTHER; note = 2'-O-methylguanosine-3'-phosphate
  modified_base 4: mod_base = OTHER; note = 2'-O-methyladenosine-3'-phosphate
  modified_base 5: mod_base = OTHER; note = 2'-O-methylguanosine-3'-phosphate
  modified_base 6: mod_base = OTHER; note = 2'-deoxy-2'-fluorocytidine-3'-phosphate
  modified_base 7: mod_base = OTHER; note = 2'-O-methyladenosine-3'-phosphate
  modified_base 8: mod_base = OTHER; note = 2'-deoxy-2'-fluoroadenosine-3'-phosphate
  modified_base 9: mod_base = OTHER; note = 2'-deoxy-2'-fluorouridine-3'-phosphate
  modified_base 10: mod_base = OTHER; note = 2'-O-methylcytidine-3'-phosphate
  modified_base 11: mod_base = OTHER; note = 2'-O-methyladenosine-3'-phosphate
  modified_base 12: mod_base = OTHER; note = 2'-O-methyluridine-3'-phosphate
  modified_base 13: mod_base = OTHER; note = 2'-O-methylguanosine-3'-phosphate
  modified_base 14: mod_base = OTHER; note = 2'-deoxy-2'-fluoroadenosine-3'-phosphate
  modified_base 15: mod_base = OTHER; note = 2'-O-methyluridine-3'-phosphate
  modified_base 16: mod_base = OTHER; note = 2'-deoxy-2'-fluoroguanosine-3'-phosphate
  modified_base 17: mod_base = OTHER; note = 2'-O-methyluridine-3'-phosphate
  modified_base 18: mod_base = OTHER; note = 2'-O-methyladenosine-3'-phosphate
  modified_base 19: mod_base = OTHER; note = 2'-O-methyladenosine-3'-phosphate
  modified_base 20: mod_base = OTHER; note = 2'-O-methylguanosine-3'-phosphate
  modified_base 21: mod_base = OTHER; note = 2'-O-methyladenosine-3'-phosphorothioate
  modified_base 22: mod_base = OTHER; note = 2'-O-methylguanosine-3'-phosphorothioate
  modified_base 23: mod_base = OTHER; note = 2'-O-methyladenosine
ttgagcaatcatgatgtaagaga

SEQ ID NO: 1483 - RNA, 23 nt, synthetic construct
  source 1..23: mol_type = other RNA
  modified_base 1: mod_base = OTHER; note = 2'-O-methyluridine-3'-phosphorothioate 5'-(E)-Vinylphosphonate
  modified_base 2: mod_base = OTHER; note = 2'-deoxy-2'-fluoroadenosine-3'-phosphorothioate
  modified_base 3: mod_base = OTHER; note = 2'-O-methylguanosine-3'-phosphate
  modified_base 4: mod_base = OTHER; note = 2'-O-methylguanosine-3'-phosphate
  modified_base 5: mod_base = OTHER; note = 2'-O-methylguanosine-3'-phosphate
  modified_base 6: mod_base = OTHER; note = 2'-deoxy-2'-fluorouridine-3'-phosphate
  modified_base 7: mod_base = OTHER; note = 2'-O-methylcytidine-3'-phosphate
  modified_base 8: mod_base = OTHER; note = 2'-deoxy-2'-fluorouridine-3'-phosphate
  modified_base 9: mod_base = OTHER; note = 2'-deoxy-2'-fluoroguanosine-3'-phosphate
  modified_base 10: mod_base = OTHER; note = 2'-O-methyladenosine-3'-phosphate
  modified_base 11: mod_base = OTHER; note = 2'-O-methylguanosine-3'-phosphate
  modified_base 12: mod_base = OTHER; note = 2'-O-methylcytidine-3'-phosphate
  modified_base 13: mod_base = OTHER; note = 2'-O-methyladenosine-3'-phosphate
  modified_base 14: mod_base = OTHER; note = 2'-deoxy-2'-fluoroadenosine-3'-phosphate
  modified_base 15: mod_base = OTHER; note = 2'-O-methyluridine-3'-phosphate
  modified_base 16: mod_base = OTHER; note = 2'-deoxy-2'-fluorocytidine-3'-phosphate
  modified_base 17: mod_base = OTHER; note = 2'-O-methyladenosine-3'-phosphate
  modified_base 18: mod_base = OTHER; note = 2'-O-methyluridine-3'-phosphate
  modified_base 19: mod_base = OTHER; note = 2'-O-methylguanosine-3'-phosphate
  modified_base 20: mod_base = OTHER; note = 2'-O-methyladenosine-3'-phosphate
  modified_base 21: mod_base = OTHER; note = 2'-O-methyluridine-3'-phosphorothioate
  modified_base 22: mod_base = OTHER; note = 2'-O-methylguanosine-3'-phosphorothioate
  modified_base 23: mod_base = OTHER; note = 2'-O-methyluridine
tagggtctgagcaatcatgatgt

SEQ ID NO: 1484 - RNA, 23 nt, synthetic construct
  source 1..23: mol_type = other RNA
  modified_base 1: mod_base = OTHER; note = 2'-O-methyluridine-3'-phosphorothioate 5'-(E)-Vinylphosphonate
  modified_base 2: mod_base = OTHER; note = 2'-deoxy-2'-fluoroadenosine-3'-phosphorothioate
  modified_base 3: mod_base = OTHER; note = 2'-O-methylguanosine-3'-phosphate
  modified_base 4: mod_base = OTHER; note = 2'-O-methylcytidine-3'-phosphate
  modified_base 5: mod_base = OTHER; note = 2'-O-methylguanosine-3'-phosphate
  modified_base 6: mod_base = OTHER; note = 2'-deoxy-2'-fluorouridine-3'-phosphate
  modified_base 7: mod_base = OTHER; note = 2'-O-methyluridine-3'-phosphate
  modified_base 8: mod_base = OTHER; note = 2'-deoxy-2'-fluorocytidine-3'-phosphate
  modified_base 9: mod_base = OTHER; note = 2'-deoxy-2'-fluorouridine-3'-phosphate
  modified_base 10: mod_base = OTHER; note = 2'-O-methyluridine-3'-phosphate
  modified_base 11: mod_base = OTHER; note = 2'-O-methylcytidine-3'-phosphate
  modified_base 12: mod_base = OTHER; note = 2'-O-methylcytidine-3'-phosphate
  modified_base 13: mod_base = OTHER; note = 2'-O-methylguanosine-3'-phosphate
  modified_base 14: mod_base = OTHER; note = 2'-deoxy-2'-fluorocytidine-3'-phosphate
  modified_base 15: mod_base = OTHER; note = 2'-O-methyladenosine-3'-phosphate
  modified_base 16: mod_base = OTHER; note = 2'-deoxy-2'-fluoroguanosine-3'-phosphate
  modified_base 17: mod_base = OTHER; note = 2'-O-methylguanosine-3'-phosphate
  modified_base 18: mod_base = OTHER; note = 2'-O-methylguanosine-3'-phosphate
  modified_base 19: mod_base = OTHER; note = 2'-O-methyluridine-3'-phosphate
  modified_base 20: mod_base = OTHER; note = 2'-O-methylcytidine-3'-phosphate
  modified_base 21: mod_base = OTHER; note = 2'-O-methyluridine-3'-phosphorothioate
  modified_base 22: mod_base = OTHER; note = 2'-O-methylguanosine-3'-phosphorothioate
  modified_base 23: mod_base = OTHER; note = 2'-O-methyladenosine
tagcgttcttccgcagggtctga

SEQ ID NO: 1485 - RNA, 23 nt, synthetic construct
  source 1..23: mol_type = other RNA
  modified_base 1: mod_base = OTHER; note = 2'-O-methyluridine-3'-phosphorothioate 5'-(E)-Vinylphosphonate
  modified_base 2: mod_base = OTHER; note = 2'-deoxy-2'-fluoroguanosine-3'-phosphorothioate
  modified_base 3: mod_base = OTHER; note = 2'-O-methyladenosine-3'-phosphate
  modified_base 4: mod_base = OTHER; note = 2'-O-methylcytidine-3'-phosphate
  modified_base 5: mod_base = OTHER; note = 2'-O-methyluridine-3'-phosphate
  modified_base 6: mod_base = OTHER; note = 2'-deoxy-2'-fluorouridine-3'-phosphate
  modified_base 7: mod_base = OTHER; note = 2'-O-methylguanosine-3'-phosphate
  modified_base 8: mod_base = OTHER; note = 2'-deoxy-2'-fluoroadenosine-3'-phosphate
  modified_base 9: mod_base = OTHER; note = 2'-deoxy-2'-fluoroguanosine-3'-phosphate
  modified_base 10: mod_base = OTHER; note = 2'-O-methylcytidine-3'-phosphate
  modified_base 11: mod_base = OTHER; note = 2'-O-methylguanosine-3'-phosphate
  modified_base 12: mod_base = OTHER; note = 2'-O-methyluridine-3'-phosphate
  modified_base 13: mod_base = OTHER; note = 2'-O-methyluridine-3'-phosphate
  modified_base 14: mod_base = OTHER; note = 2'-deoxy-2'-fluorocytidine-3'-phosphate
  modified_base 15: mod_base = OTHER; note = 2'-O-methyluridine-3'-phosphate
  modified_base 16: mod_base = OTHER; note = 2'-deoxy-2'-fluorouridine-3'-phosphate
  modified_base 17: mod_base = OTHER; note = 2'-O-methylcytidine-3'-phosphate
  modified_base 18: mod_base = OTHER; note = 2'-O-methylcytidine-3'-phosphate
  modified_base 19: mod_base = OTHER; note = 2'-O-methylguanosine-3'-phosphate
  modified_base 20: mod_base = OTHER; note = 2'-O-methylcytidine-3'-phosphate
  modified_base 21: mod_base = OTHER; note = 2'-O-methyladenosine-3'-phosphorothioate
  modified_base 22: mod_base = OTHER; note = 2'-O-methylguanosine-3'-phosphorothioate
  modified_base 23: mod_base = OTHER; note = 2'-O-methylguanosine
tgacttgagcgttcttccgcagg

SEQ ID NO: 1486 - RNA, 23 nt, synthetic construct
  source 1..23: mol_type = other RNA
  modified_base 1: mod_base = OTHER; note = 2'-O-methyluridine-3'-phosphorothioate 5'-(E)-Vinylphosphonate
  modified_base 2: mod_base = OTHER; note = 2'-deoxy-2'-fluorouridine-3'-phosphorothioate
  modified_base 3: mod_base = OTHER; note = 2'-O-methyluridine-3'-phosphate
  modified_base 4: mod_base = OTHER; note = 2'-O-methyluridine-3'-phosphate
  modified_base 5: mod_base = OTHER; note = 2'-O-methylcytidine-3'-phosphate
  modified_base 6: mod_base = OTHER; note = 2'-deoxy-2'-fluorouridine-3'-phosphate
  modified_base 7: mod_base = OTHER; note = 2'-O-methylguanosine-3'-phosphate
  modified_base 8: mod_base = OTHER; note = 2'-deoxy-2'-fluoroadenosine-3'-phosphate
  modified_base 9: mod_base = OTHER; note = 2'-deoxy-2'-fluorocytidine-3'-phosphate
  modified_base 10: mod_base = OTHER; note = 2'-O-methyluridine-3'-phosphate
  modified_base 11: mod_base = OTHER; note = 2'-O-methyluridine-3'-phosphate
  modified_base 12: mod_base = OTHER; note = 2'-O-methylguanosine-3'-phosphate
  modified_base 13: mod_base = OTHER; note = 2'-O-methyladenosine-3'-phosphate
  modified_base 14: mod_base = OTHER; note = 2'-deoxy-2'-fluoroguanosine-3'-phosphate
  modified_base 15: mod_base = OTHER; note = 2'-O-methylcytidine-3'-phosphate
  modified_base 16: mod_base = OTHER; note = 2'-deoxy-2'-fluoroguanosine-3'-phosphate
  modified_base 17: mod_base = OTHER; note = 2'-O-methyluridine-3'-phosphate
  modified_base 18: mod_base = OTHER; note = 2'-O-methyluridine-3'-phosphate
  modified_base 19: mod_base = OTHER; note = 2'-O-methylcytidine-3'-phosphate
  modified_base 20: mod_base = OTHER; note = 2'-O-methyluridine-3'-phosphate
  modified_base 21: mod_base = OTHER; note = 2'-O-methyluridine-3'-phosphorothioate
  modified_base 22: mod_base = OTHER; note = 2'-O-methylcytidine-3'-phosphorothioate
  modified_base 23: mod_base = OTHER; note = 2'-O-methylcytidine
ttttctgacttgagcgttcttcc

SEQ ID NO: 1487 - RNA, 23 nt, synthetic construct
  source 1..23: mol_type = other RNA
  modified_base 1: mod_base = OTHER; note = 2'-O-methyluridine-3'-phosphorothioate 5'-(E)-Vinylphosphonate
  modified_base 2: mod_base = OTHER; note = 2'-deoxy-2'-fluoroguanosine-3'-phosphorothioate
  modified_base 3: mod_base = OTHER; note = 2'-O-methylguanosine-3'-phosphate
  modified_base 4: mod_base = OTHER; note = 2'-O-methylcytidine-3'-phosphate
  modified_base 5: mod_base = OTHER; note = 2'-O-methyladenosine-3'-phosphate
  modified_base 6: mod_base = OTHER; note = 2'-deoxy-2'-fluorocytidine-3'-phosphate
  modified_base 7: mod_base = OTHER; note = 2'-O-methyluridine-3'-phosphate
  modified_base 8: mod_base = OTHER; note = 2'-deoxy-2'-fluorouridine-3'-phosphate
  modified_base 9: mod_base = OTHER; note = 2'-deoxy-2'-fluorouridine-3'-phosphate
  modified_base 10: mod_base = OTHER; note = 2'-O-methylcytidine-3'-phosphate
  modified_base 11: mod_base = OTHER; note = 2'-O-methyluridine-3'-phosphate
  modified_base 12: mod_base = OTHER; note = 2'-O-methylguanosine-3'-phosphate
  modified_base 13: mod_base = OTHER; note = 2'-O-methyladenosine-3'-phosphate
  modified_base 14: mod_base = OTHER; note = 2'-deoxy-2'-fluorocytidine-3'-phosphate
  modified_base 15: mod_base = OTHER; note = 2'-O-methyluridine-3'-phosphate
  modified_base 16: mod_base = OTHER; note = 2'-deoxy-2'-fluorouridine-3'-phosphate
  modified_base 17: mod_base = OTHER; note = 2'-O-methylguanosine-3'-phosphate
  modified_base 18: mod_base = OTHER; note = 2'-O-methyladenosine-3'-phosphate
  modified_base 19: mod_base = OTHER; note = 2'-O-methylguanosine-3'-phosphate
  modified_base 20: mod_base = OTHER; note = 2'-O-methylcytidine-3'-phosphate
  modified_base 21: mod_base = OTHER; note = 2'-O-methylguanosine-3'-phosphorothioate
  modified_base 22: mod_base = OTHER; note = 2'-O-methyluridine-3'-phosphorothioate
  modified_base 23: mod_base = OTHER; note = 2'-O-methyluridine
tggcactttctgacttgagcgtt

SEQ ID NO: 1488 - RNA, 23 nt, synthetic construct
  source 1..23: mol_type = other RNA
  modified_base 1: mod_base = OTHER; note = 2'-O-methyluridine-3'-phosphorothioate 5'-(E)-Vinylphosphonate
  modified_base 2: mod_base = OTHER; note = 2'-deoxy-2'-fluoroguanosine-3'-phosphorothioate
  modified_base 3: mod_base = OTHER; note = 2'-O-methyladenosine-3'-phosphate
  modified_base 4: mod_base = OTHER; note = 2'-O-methyladenosine-3'-phosphate
  modified_base 5: mod_base = OTHER; note = 2'-O-methylguanosine-3'-phosphate
  modified_base 6: mod_base = OTHER; note = 2'-deoxy-2'-fluorocytidine-3'-phosphate
  modified_base 7: mod_base = OTHER; note = 2'-O-methyladenosine-3'-phosphate
  modified_base 8: mod_base = OTHER; note = 2'-deoxy-2'-fluorouridine-3'-phosphate
  modified_base 9: mod_base = OTHER; note = 2'-deoxy-2'-fluorocytidine-3'-phosphate
  modified_base 10: mod_base = OTHER; note = 2'-O-methylguanosine-3'-phosphate
  modified_base 11: mod_base = OTHER; note = 2'-O-methyladenosine-3'-phosphate
  modified_base 12: mod_base = OTHER; note = 2'-O-methylcytidine-3'-phosphate
  modified_base 13: mod_base = OTHER; note = 2'-O-methyluridine-3'-phosphate
  modified_base 14: mod_base = OTHER; note = 2'-deoxy-2'-fluoroguanosine-3'-phosphate
  modified_base 15: mod_base = OTHER; note = 2'-O-methyluridine-3'-phosphate
  modified_base 16: mod_base = OTHER; note = 2'-deoxy-2'-fluoroguanosine-3'-phosphate
  modified_base 17: mod_base = OTHER; note = 2'-O-methyladenosine-3'-phosphate
  modified_base 18: mod_base = OTHER; note = 2'-O-methyluridine-3'-phosphate
  modified_base 19: mod_base = OTHER; note = 2'-O-methyluridine-3'-phosphate
  modified_base 20: mod_base = OTHER; note = 2'-O-methyladenosine-3'-phosphate
  modified_base 21: mod_base = OTHER; note = 2'-O-methylcytidine-3'-phosphorothioate
  modified_base 22: mod_base = OTHER; note = 2'-O-methyladenosine-3'-phosphorothioate
  modified_base 23: mod_base = OTHER; note = 2'-O-methylguanosine
tgaagcatcgactgtgattacag

SEQ ID NO: 1489 - RNA, 23 nt, synthetic construct
  source 1..23: mol_type = other RNA
  modified_base 1: mod_base = OTHER; note = 2'-O-methyluridine-3'-phosphorothioate 5'-(E)-Vinylphosphonate
  modified_base 2: mod_base = OTHER; note = 2'-deoxy-2'-fluoroguanosine-3'-phosphorothioate
  modified_base 3: mod_base = OTHER; note = 2'-O-methyluridine-3'-phosphate
  modified_base 4: mod_base = OTHER; note = 2'-O-methylguanosine-3'-phosphate
  modified_base 5: mod_base = OTHER; note = 2'-O-methylguanosine-3'-phosphate
  modified_base 6: mod_base = OTHER; note = 2'-deoxy-2'-fluorouridine-3'-phosphate
  modified_base 7: mod_base = OTHER; note = 2'-O-methylcytidine-3'-phosphate
  modified_base 8: mod_base = OTHER; note = 2'-deoxy-2'-fluorouridine-3'-phosphate
  modified_base 9: mod_base = OTHER; note = 2'-deoxy-2'-fluoroguanosine-3'-phosphate
  modified_base 10: mod_base = OTHER; note = 2'-O-methylguanosine-3'-phosphate
  modified_base 11: mod_base = OTHER; note = 2'-O-methyladenosine-3'-phosphate
  modified_base 12: mod_base = OTHER; note = 2'-O-methyladenosine-3'-phosphate
  modified_base 13: mod_base = OTHER; note = 2'-O-methylguanosine-3'-phosphate
  modified_base 14: mod_base = OTHER; note = 2'-deoxy-2'-fluorocytidine-3'-phosphate
  modified_base 15: mod_base = OTHER; note = 2'-O-methyladenosine-3'-phosphate
  modified_base 16: mod_base = OTHER; note = 2'-deoxy-2'-fluorouridine-3'-phosphate
  modified_base 17: mod_base = OTHER; note = 2'-O-methylcytidine-3'-phosphate
  modified_base 18: mod_base = OTHER; note = 2'-O-methylguanosine-3'-phosphate
  modified_base 19: mod_base = OTHER; note = 2'-O-methyladenosine-3'-phosphate
  modified_base 20: mod_base = OTHER; note = 2'-O-methylcytidine-3'-phosphate
  modified_base 21: mod_base = OTHER; note = 2'-O-methyluridine-3'-phosphorothioate
  modified_base 22: mod_base = OTHER; note = 2'-O-methylguanosine-3'-phosphorothioate
  modified_base 23: mod_base = OTHER; note = 2'-O-methyluridine
tgtggtctggaagcatcgactgt

SEQ ID NO: 1490 - RNA, 23 nt, synthetic construct
  source 1..23: mol_type = other RNA
  modified_base 1: mod_base = OTHER; note = 2'-O-methyluridine-3'-phosphorothioate 5'-(E)-Vinylphosphonate
  modified_base 2: mod_base = OTHER; note = 2'-deoxy-2'-fluoroadenosine-3'-phosphorothioate
  modified_base 3: mod_base = OTHER; note = 2'-O-methyladenosine-3'-phosphate
  modified_base 4: mod_base = OTHER; note = 2'-O-methyladenosine-3'-phosphate
  modified_base 5: mod_base = OTHER; note = 2'-O-methylguanosine-3'-phosphate
  modified_base 6: mod_base = OTHER; note = 2'-deoxy-2'-fluoroguanosine-3'-phosphate
  modified_base 7: mod_base = OTHER; note = 2'-O-methylcytidine-3'-phosphate
  modified_base 8: mod_base = OTHER; note = 2'-deoxy-2'-fluorouridine-3'-phosphate
  modified_base 9: mod_base = OTHER; note = 2'-deoxy-2'-fluoroguanosine-3'-phosphate
  modified_base 10: mod_base = OTHER; note = 2'-O-methyluridine-3'-phosphate
  modified_base 11: mod_base = OTHER; note = 2'-O-methylguanosine-3'-phosphate
  modified_base 12: mod_base = OTHER; note = 2'-O-methylguanosine-3'-phosphate
  modified_base 13: mod_base = OTHER; note = 2'-O-methyluridine-3'-phosphate
  modified_base 14: mod_base = OTHER; note = 2'-deoxy-2'-fluorocytidine-3'-phosphate
  modified_base 15: mod_base = OTHER; note = 2'-O-methyluridine-3'-phosphate
  modified_base 16: mod_base = OTHER; note = 2'-deoxy-2'-fluoroguanosine-3'-phosphate
  modified_base 17: mod_base = OTHER; note = 2'-O-methylguanosine-3'-phosphate
  modified_base 18: mod_base = OTHER; note = 2'-O-methyladenosine-3'-phosphate
  modified_base 19: mod_base = OTHER; note = 2'-O-methyladenosine-3'-phosphate
  modified_base 20: mod_base = OTHER; note = 2'-O-methylguanosine-3'-phosphate
  modified_base 21: mod_base = OTHER; note = 2'-O-methylcytidine-3'-phosphorothioate
  modified_base 22: mod_base = OTHER; note = 2'-O-methyladenosine-3'-phosphorothioate
  modified_base 23: mod_base = OTHER; note = 2'-O-methyluridine
taaaggctgtggtctggaagcat

SEQ ID NO: 1491 - RNA, 23 nt, synthetic construct
  source 1..23: mol_type = other RNA
  modified_base 1: mod_base = OTHER; note = 2'-O-methyluridine-3'-phosphorothioate 5'-(E)-Vinylphosphonate
  modified_base 2: mod_base = OTHER; note = 2'-deoxy-2'-fluorocytidine-3'-phosphorothioate
  modified_base 3: mod_base = OTHER; note = 2'-O-methylcytidine-3'-phosphate
  modified_base 4: mod_base = OTHER; note = 2'-O-methyladenosine-3'-phosphate
  modified_base 5: mod_base = OTHER; note = 2'-O-methyluridine-3'-phosphate
  modified_base 6: mod_base = OTHER; note = 2'-deoxy-2'-fluoroguanosine-3'-phosphate
  modified_base 7: mod_base = OTHER; note = 2'-O-methyladenosine-3'-phosphate
  modified_base 8: mod_base = OTHER; note = 2'-deoxy-2'-fluoroadenosine-3'-phosphate
  modified_base 9: mod_base = OTHER; note = 2'-deoxy-2'-fluoroadenosine-3'-phosphate
  modified_base 10: mod_base = OTHER; note = 2'-O-methylguanosine-3'-phosphate
  modified_base 11: mod_base = OTHER; note = 2'-O-methylguanosine-3'-phosphate
  modified_base 12: mod_base = OTHER; note = 2'-O-methylcytidine-3'-phosphate
  modified_base 13: mod_base = OTHER; note = 2'-O-methyluridine-3'-phosphate
  modified_base 14: mod_base = OTHER; note = 2'-deoxy-2'-fluoroguanosine-3'-phosphate
  modified_base 15: mod_base = OTHER; note = 2'-O-methyluridine-3'-phosphate
  modified_base 16: mod_base = OTHER; note = 2'-deoxy-2'-fluoroguanosine-3'-phosphate
  modified_base 17: mod_base = OTHER; note = 2'-O-methylguanosine-3'-phosphate
  modified_base 18: mod_base = OTHER; note = 2'-O-methyluridine-3'-phosphate
  modified_base 19: mod_base = OTHER; note = 2'-O-methylcytidine-3'-phosphate
  modified_base 20: mod_base = OTHER; note = 2'-O-methyluridine-3'-phosphate
  modified_base 21: mod_base = OTHER; note = 2'-O-methylguanosine-3'-phosphorothioate
  modified_base 22: mod_base = OTHER; note = 2'-O-methylguanosine-3'-phosphorothioate
  modified_base 23: mod_base = OTHER; note = 2'-O-methyladenosine
tccatgaaaggctgtggtctgga

SEQ ID NO: 1492 - RNA, 23 nt, synthetic construct
  source 1..23: mol_type = other RNA
  modified_base 1: mod_base = OTHER; note = 2'-O-methyluridine-3'-phosphorothioate 5'-(E)-Vinylphosphonate
  modified_base 2: mod_base = OTHER; note = 2'-deoxy-2'-fluoroadenosine-3'-phosphorothioate
  modified_base 3: mod_base = OTHER; note = 2'-O-methylcytidine-3'-phosphate
  modified_base 4: mod_base = OTHER; note = 2'-O-methyladenosine-3'-phosphate
  modified_base 5: mod_base = OTHER; note = 2'-O-methylcytidine-3'-phosphate
  modified_base 6: mod_base = OTHER; note = 2'-deoxy-2'-fluorouridine-3'-phosphate
  modified_base 7: mod_base = OTHER; note = 2'-O-methylguanosine-3'-phosphate
  modified_base 8: mod_base = OTHER; note = 2'-deoxy-2'-fluoroguanosine-3'-phosphate
  modified_base 9: mod_base = OTHER; note = 2'-deoxy-2'-fluoroadenosine-3'-phosphate
  modified_base 10: mod_base = OTHER; note = 2'-O-methyluridine-3'-phosphate
  modified_base 11: mod_base = OTHER; note = 2'-O-methylguanosine-3'-phosphate
  modified_base 12: mod_base = OTHER; note = 2'-O-methylguanosine-3'-phosphate
  modified_base 13: mod_base = OTHER; note = 2'-O-methylguanosine-3'-phosphate
  modified_base 14: mod_base = OTHER; note = 2'-deoxy-2'-fluoroadenosine-3'-phosphate
  modified_base 15: mod_base = OTHER; note = 2'-O-methyluridine-3'-phosphate
  modified_base 16: mod_base = OTHER; note = 2'-deoxy-2'-fluorocytidine-3'-phosphate
  modified_base 17: mod_base = OTHER; note = 2'-O-methyluridine-3'-phosphate
  modified_base 18: mod_base = OTHER; note = 2'-O-methylcytidine-3'-phosphate
  modified_base 19: mod_base = OTHER; note = 2'-O-methylcytidine-3'-phosphate
  modified_base 20: mod_base = OTHER; note = 2'-O-methyladenosine-3'-phosphate
  modified_base 21: mod_base = OTHER; note = 2'-O-methylcytidine-3'-phosphorothioate
  modified_base 22: mod_base = OTHER; note = 2'-O-methylcytidine-3'-phosphorothioate
  modified_base 23: mod_base = OTHER; note = 2'-O-methyluridine
tacactggatgggatctccacct

SEQ ID NO: 1493 - RNA, 23 nt, synthetic construct
  source 1..23: mol_type = other RNA
  modified_base 1: mod_base = OTHER; note = 2'-O-methyluridine-3'-phosphorothioate 5'-(E)-Vinylphosphonate
  modified_base 2: mod_base = OTHER; note = 2'-deoxy-2'-fluoroadenosine-3'-phosphorothioate
  modified_base 3: mod_base = OTHER; note = 2'-O-methyluridine-3'-phosphate
  modified_base 4: mod_base = OTHER; note = 2'-O-methylguanosine-3'-phosphate
  modified_base 5: mod_base = OTHER; note = 2'-O-methylguanosine-3'-phosphate
  modified_base 6: mod_base = OTHER; note = 2'-deoxy-2'-fluorocytidine-3'-phosphate
  modified_base 7: mod_base = OTHER; note = 2'-O-methyladenosine-3'-phosphate
  modified_base 8: mod_base = OTHER; note = 2'-deoxy-2'-fluorocytidine-3'-phosphate
  modified_base 9: mod_base = OTHER; note = 2'-deoxy-2'-fluoroadenosine-3'-phosphate
  modified_base 10: mod_base = OTHER; note = 2'-O-methylcytidine-3'-phosphate
  modified_base 11: mod_base = OTHER; note = 2'-O-methyluridine-3'-phosphate
  modified_base 12: mod_base = OTHER; note = 2'-O-methylguanosine-3'-phosphate
  modified_base 13: mod_base = OTHER; note = 2'-O-methylguanosine-3'-phosphate
  modified_base 14: mod_base = OTHER; note = 2'-deoxy-2'-fluoroadenosine-3'-phosphate
  modified_base 15: mod_base = OTHER; note = 2'-O-methyluridine-3'-phosphate
  modified_base 16: mod_base = OTHER; note = 2'-deoxy-2'-fluoroguanosine-3'-phosphate
  modified_base 17: mod_base = OTHER; note = 2'-O-methylguanosine-3'-phosphate
  modified_base 18: mod_base = OTHER; note = 2'-O-methylguanosine-3'-phosphate
  modified_base 19: mod_base = OTHER; note = 2'-O-methyladenosine-3'-phosphate
  modified_base 20: mod_base = OTHER; note = 2'-O-methyluridine-3'-phosphate
  modified_base 21: mod_base = OTHER; note = 2'-O-methylcytidine-3'-phosphorothioate
  modified_base 22: mod_base = OTHER; note = 2'-O-methyluridine-3'-phosphorothioate
  modified_base 23: mod_base = OTHER; note = 2'-O-methylcytidine
tatggcacactggatgggatctc

SEQ ID NO: 1494 - RNA, 23 nt, synthetic construct
  source 1..23: mol_type = other RNA
  modified_base 1: mod_base = OTHER; note = 2'-O-methyluridine-3'-phosphorothioate 5'-(E)-Vinylphosphonate
  modified_base 2: mod_base = OTHER; note = 2'-deoxy-2'-fluoroguanosine-3'-phosphorothioate
  modified_base 3: mod_base = OTHER; note = 2'-O-methyluridine-3'-phosphate
  modified_base 4: mod_base = OTHER; note = 2'-O-methyluridine-3'-phosphate
  modified_base 5: mod_base = OTHER; note = 2'-O-methylcytidine-3'-phosphate
  modified_base 6: mod_base = OTHER; note = 2'-deoxy-2'-fluorocytidine-3'-phosphate
  modified_base 7: mod_base = OTHER; note = 2'-O-methyluridine-3'-phosphate
  modified_base 8: mod_base = OTHER; note = 2'-deoxy-2'-fluoroadenosine-3'-phosphate
  modified_base 9: mod_base = OTHER; note = 2'-deoxy-2'-fluorouridine-3'-phosphate
  modified_base 10: mod_base = OTHER; note = 2'-O-methyladenosine-3'-phosphate
  modified_base 11: mod_base = OTHER; note = 2'-O-methylcytidine-3'-phosphate
  modified_base 12: mod_base = OTHER; note = 2'-O-methyladenosine-3'-phosphate
  modified_base 13: mod_base = OTHER; note = 2'-O-methylguanosine-3'-phosphate
  modified_base 14: mod_base = OTHER; note = 2'-deoxy-2'-fluoroadenosine-3'-phosphate
  modified_base 15: mod_base = OTHER; note = 2'-O-methylguanosine-3'-phosphate
  modified_base 16: mod_base = OTHER; note = 2'-deoxy-2'-fluorocytidine-3'-phosphate
  modified_base 17: mod_base = OTHER; note = 2'-O-methylcytidine-3'-phosphate
  modified_base 18: mod_base = OTHER; note = 2'-O-methylguanosine-3'-phosphate
  modified_base 19: mod_base = OTHER; note = 2'-O-methylguanosine-3'-phosphate
  modified_base 20: mod_base = OTHER; note = 2'-O-methylcytidine-3'-phosphate
  modified_base 21: mod_base = OTHER; note = 2'-O-methyladenosine-3'-phosphorothioate
  modified_base 22: mod_base = OTHER; note = 2'-O-methyluridine-3'-phosphorothioate
  modified_base 23: mod_base = OTHER; note = 2'-O-methylguanosine
tgttcctatacagagccggcatg

SEQ ID NO: 1495 - RNA, 23 nt, synthetic construct
  source 1..23: mol_type = other RNA
  modified_base 1: mod_base = OTHER; note = 2'-O-methyluridine-3'-phosphorothioate 5'-(E)-Vinylphosphonate
  modified_base 2: mod_base = OTHER; note = 2'-deoxy-2'-fluorouridine-3'-phosphorothioate
  modified_base 3: mod_base = OTHER; note = 2'-O-methyluridine-3'-phosphate
  modified_base 4: mod_base = OTHER; note = 2'-O-methylcytidine-3'-phosphate
  modified_base 5: mod_base = OTHER; note = 2'-O-methyluridine-3'-phosphate
  modified_base 6: mod_base = OTHER; note = 2'-deoxy-2'-fluoroguanosine-3'-phosphate
  modified_base 7: mod_base = OTHER; note = 2'-O-methylguanosine-3'-phosphate
  modified_base 8: mod_base = OTHER; note = 2'-deoxy-2'-fluorouridine-3'-phosphate
  modified_base 9: mod_base = OTHER; note = 2'-deoxy-2'-fluorouridine-3'-phosphate
  modified_base 10: mod_base = OTHER; note = 2'-O-methylcytidine-3'-phosphate
  modified_base 11: mod_base = OTHER; note = 2'-O-methylcytidine-3'-phosphate
  modified_base 12: mod_base = OTHER; note = 2'-O-methyluridine-3'-phosphate
  modified_base 13: mod_base = OTHER; note = 2'-O-methyladenosine-3'-phosphate
  modified_base 14: mod_base = OTHER; note = 2'-deoxy-2'-fluorouridine-3'-phosphate
  modified_base 15: mod_base = OTHER; note = 2'-O-methyladenosine-3'-phosphate
  modified_base 16: mod_base = OTHER; note = 2'-deoxy-2'-fluorocytidine-3'-phosphate
  modified_base 17: mod_base = OTHER; note = 2'-O-methyladenosine-3'-phosphate
  modified_base 18: mod_base = OTHER; note = 2'-O-methylguanosine-3'-phosphate
  modified_base 19: mod_base = OTHER; note = 2'-O-methyladenosine-3'-phosphate
  modified_base 20: mod_base = OTHER; note = 2'-O-methylguanosine-3'-phosphate
  modified_base 21: mod_base = OTHER; note = 2'-O-methylcytidine-3'-phosphorothioate
  modified_base 22: mod_base = OTHER; note = 2'-O-methylcytidine-3'-phosphorothioate
  modified_base 23: mod_base = OTHER; note = 2'-O-methylguanosine
tttctggttcctatacagagccg

SEQ ID NO: 1496 - RNA, 23 nt, synthetic construct
  source 1..23: mol_type = other RNA
  modified_base 1: mod_base = OTHER; note = 2'-O-methyluridine-3'-phosphorothioate 5'-(E)-Vinylphosphonate
  modified_base 2: mod_base = OTHER; note = 2'-deoxy-2'-fluorouridine-3'-phosphorothioate
  modified_base 3: mod_base = OTHER; note = 2'-O-methylguanosine-3'-phosphate
  modified_base 4: mod_base = OTHER; note = 2'-O-methyluridine-3'-phosphate
  modified_base 5: mod_base = OTHER; note = 2'-O-methyladenosine-3'-phosphate
  modified_base 6: mod_base = OTHER; note = 2'-deoxy-2'-fluoroadenosine-3'-phosphate
  modified_base 7: mod_base = OTHER; note = 2'-O-methyluridine-3'-phosphate
  modified_base 8: mod_base = OTHER; note = 2'-deoxy-2'-fluorouridine-3'-phosphate
  modified_base 9: mod_base = OTHER; note = 2'-deoxy-2'-fluorocytidine-3'-phosphate
  modified_base 10: mod_base = OTHER; note = 2'-O-methyluridine-3'-phosphate
  modified_base 11: mod_base = OTHER; note = 2'-O-methylguanosine-3'-phosphate
  modified_base 12: mod_base = OTHER; note = 2'-O-methylguanosine-3'-phosphate
  modified_base 13: mod_base = OTHER; note = 2'-O-methyluridine-3'-phosphate
  modified_base 14: mod_base = OTHER; note = 2'-deoxy-2'-fluorouridine-3'-phosphate
  modified_base 15: mod_base = OTHER; note = 2'-O-methylcytidine-3'-phosphate
  modified_base 16: mod_base = OTHER; note = 2'-deoxy-2'-fluorocytidine-3'-phosphate
  modified_base 17: mod_base = OTHER; note = 2'-O-methyluridine-3'-phosphate
  modified_base 18: mod_base = OTHER; note = 2'-O-methyladenosine-3'-phosphate
  modified_base 19: mod_base = OTHER; note = 2'-O-methyluridine-3'-phosphate
  modified_base 20: mod_base = OTHER; note = 2'-O-methyladenosine-3'-phosphate
  modified_base 21: mod_base = OTHER; note = 2'-O-methylcytidine-3'-phosphorothioate
  modified_base 22: mod_base = OTHER; note = 2'-O-methyladenosine-3'-phosphorothioate
  modified_base 23: mod_base = OTHER; note = 2'-O-methylguanosine
ttgtaattctggttcctatacag

SEQ ID NO: 1497 - RNA, 23 nt, synthetic construct
  source 1..23: mol_type = other RNA
  modified_base 1: mod_base = OTHER; note = 2'-O-methyluridine-3'-phosphorothioate 5'-(E)-Vinylphosphonate
  modified_base 2: mod_base = OTHER; note = 2'-deoxy-2'-fluoroguanosine-3'-phosphorothioate
  modified_base 3: mod_base = OTHER; note = 2'-O-methyluridine-3'-phosphate
  modified_base 4: mod_base = OTHER; note = 2'-O-methyluridine-3'-phosphate
  modified_base 5: mod_base = OTHER; note = 2'-O-methyluridine-3'-phosphate
  modified_base 6: mod_base = OTHER; note = 2'-deoxy-2'-fluoroguanosine-3'-phosphate
  modified_base 7: mod_base = OTHER; note = 2'-O-methyluridine-3'-phosphate
  modified_base 8: mod_base = OTHER; note = 2'-deoxy-2'-fluorouridine-3'-phosphate
  modified_base 9: mod_base = OTHER; note = 2'-deoxy-2'-fluoroguanosine-3'-phosphate
  modified_base 10: mod_base = OTHER; note = 2'-O-methyluridine-3'-phosphate
  modified_base 11: mod_base = OTHER; note = 2'-O-methyladenosine-3'-phosphate
  modified_base 12: mod_base = OTHER; note = 2'-O-methyladenosine-3'-phosphate
  modified_base 13: mod_base = OTHER; note = 2'-O-methyluridine-3'-phosphate
  modified_base 14: mod_base = OTHER; note = 2'-deoxy-2'-fluorouridine-3'-phosphate
  modified_base 15: mod_base = OTHER; note = 2'-O-methylcytidine-3'-phosphate
  modified_base 16: mod_base = OTHER; note = 2'-deoxy-2'-fluorouridine-3'-phosphate
  modified_base 17: mod_base = OTHER; note = 2'-O-methylguanosine-3'-phosphate
  modified_base 18: mod_base = OTHER; note = 2'-O-methylguanosine-3'-phosphate
  modified_base 19: mod_base = OTHER; note = 2'-O-methyluridine-3'-phosphate
  modified_base 20: mod_base = OTHER; note = 2'-O-methyluridine-3'-phosphate
  modified_base 21: mod_base = OTHER; note = 2'-O-methylcytidine-3'-phosphorothioate
  modified_base 22: mod_base = OTHER; note = 2'-O-methylcytidine-3'-phosphorothioate
  modified_base 23: mod_base = OTHER; note = 2'-O-methyluridine
tgtttgttgtaattctggttcct

SEQ ID NO: 1498 - RNA, 23 nt, synthetic construct
  source 1..23: mol_type = other RNA
  modified_base 1: mod_base = OTHER; note = 2'-O-methyluridine-3'-phosphorothioate 5'-(E)-Vinylphosphonate
  modified_base 2: mod_base = OTHER; note = 2'-deoxy-2'-fluorouridine-3'-phosphorothioate
  modified_base 3: mod_base = OTHER; note = 2'-O-methylguanosine-3'-phosphate
  modified_base 4: mod_base = OTHER; note = 2'-O-methylcytidine-3'-phosphate
  modified_base 5: mod_base = OTHER; note = 2'-O-methyluridine-3'-phosphate
  modified_base 6: mod_base = OTHER; note = 2'-deoxy-2'-fluoroguanosine-3'-phosphate
  modified_base 7: mod_base = OTHER; note = 2'-O-methylcytidine-3'-phosphate
  modified_base 8: mod_base = OTHER; note = 2'-deoxy-2'-fluoroadenosine-3'-phosphate
  modified_base 9: mod_base = OTHER; note = 2'-deoxy-2'-fluoroguanosine-3'-phosphate
  modified_base 10: mod_base = OTHER; note = 2'-O-methyluridine-3'-phosphate
  modified_base 11: mod_base = OTHER; note = 2'-O-methyluridine-3'-phosphate
  modified_base 12: mod_base = OTHER; note = 2'-O-methyluridine-3'-phosphate
  modified_base 13: mod_base = OTHER; note = 2'-O-methylguanosine-3'-phosphate
  modified_base 14: mod_base = OTHER; note = 2'-deoxy-2'-fluorouridine-3'-phosphate
  modified_base 15: mod_base = OTHER; note = 2'-O-methyluridine-3'-phosphate
  modified_base 16: mod_base = OTHER; note = 2'-deoxy-2'-fluoroguanosine-3'-phosphate
  modified_base 17: mod_base = OTHER; note = 2'-O-methyluridine-3'-phosphate
  modified_base 18: mod_base = OTHER; note = 2'-O-methyladenosine-3'-phosphate
  modified_base 19: mod_base = OTHER; note = 2'-O-methyladenosine-3'-phosphate
  modified_base 20: mod_base = OTHER; note = 2'-O-methyluridine-3'-phosphate
  modified_base 21: mod_base = OTHER; note = 2'-O-methyluridine-3'-phosphorothioate
  modified_base 22: mod_base = OTHER; note = 2'-O-methylcytidine-3'-phosphorothioate
  modified_base 23: mod_base = OTHER; note = 2'-O-methyluridine
ttgctgcagtttgttgtaattct

SEQ ID NO: 1499 - RNA, 23 nt, synthetic construct
  source 1..23: mol_type = other RNA
  modified_base 1: mod_base = OTHER; note = 2'-O-methyluridine-3'-phosphorothioate 5'-(E)-Vinylphosphonate
  modified_base 2: mod_base = OTHER; note = 2'-deoxy-2'-fluorouridine-3'-phosphorothioate
  modified_base 3: mod_base = OTHER; note = 2'-O-methylguanosine-3'-phosphate
  modified_base 4: mod_base = OTHER; note = 2'-O-methyladenosine-3'-phosphate
  modified_base 5: mod_base = OTHER; note = 2'-O-methyladenosine-3'-phosphate
  modified_base 6: mod_base = OTHER; note = 2'-deoxy-2'-fluorocytidine-3'-phosphate
  modified_base 7: mod_base = OTHER; note = 2'-O-methylguanosine-3'-phosphate
  modified_base 8: mod_base = OTHER; note = 2'-deoxy-2'-fluorouridine-3'-phosphate
  modified_base 9: mod_base = OTHER; note = 2'-deoxy-2'-fluoroguanosine-3'-phosphate
  modified_base 10: mod_base = OTHER; note = 2'-O-methylcytidine-3'-phosphate
  modified_base 11: mod_base = OTHER; note = 2'-O-methyluridine-3'-phosphate
  modified_base 12: mod_base = OTHER; note = 2'-O-methylguanosine-3'-phosphate
  modified_base 13: mod_base = OTHER; note = 2'-O-methylcytidine-3'-phosphate
  modified_base 14: mod_base = OTHER; note = 2'-deoxy-2'-fluoroadenosine-3'-phosphate
  modified_base 15: mod_base = OTHER; note = 2'-O-methylguanosine-3'-phosphate
  modified_base 16: mod_base = OTHER; note = 2'-deoxy-2'-fluorouridine-3'-phosphate
  modified_base 17: mod_base = OTHER; note = 2'-O-methyluridine-3'-phosphate
  modified_base 18: mod_base = OTHER; note = 2'-O-methyluridine-3'-phosphate
  modified_base 19: mod_base = OTHER; note = 2'-O-methylguanosine-3'-phosphate
  modified_base 20: mod_base = OTHER; note = 2'-O-methyluridine-3'-phosphate
  modified_base 21: mod_base = OTHER; note = 2'-O-methyluridine-3'-phosphorothioate
  modified_base 22: mod_base = OTHER; note = 2'-O-methylguanosine-3'-phosphorothioate
  modified_base 23: mod_base = OTHER; note = 2'-O-methyluridine
ttgaacgtgctgcagtttgttgt

SEQ ID NO: 1500 - RNA, 23 nt, synthetic construct
  source 1..23: mol_type = other RNA
  modified_base 1: mod_base = OTHER; note = 2'-O-methyluridine-3'-phosphorothioate 5'-(E)-Vinylphosphonate
  modified_base 2: mod_base = OTHER; note = 2'-deoxy-2'-fluorocytidine-3'-phosphorothioate
  modified_base 3: mod_base = OTHER; note = 2'-O-methylguanosine-3'-phosphate
  modified_base 4: mod_base = OTHER; note = 2'-O-methylguanosine-3'-phosphate
  modified_base 5: mod_base = OTHER; note = 2'-O-methylguanosine-3'-phosphate
  modified_base 6: mod_base = OTHER; note = 2'-deoxy-2'-fluorouridine-3'-phosphate
  modified_base 7: mod_base = OTHER; note = 2'-O-methylcytidine-3'-phosphate
  modified_base 8: mod_base = OTHER; note = 2'-deoxy-2'-fluorouridine-3'-phosphate
  modified_base 9: mod_base = OTHER; note = 2'-deoxy-2'-fluoroguanosine-3'-phosphate
  modified_base 10: mod_base = OTHER; note = 2'-O-methyladenosine-3'-phosphate
  modified_base 11: mod_base = OTHER; note = 2'-O-methyladenosine-3'-phosphate
  modified_base 12: mod_base = OTHER; note = 2'-O-methylcytidine-3'-phosphate
  modified_base 13: mod_base = OTHER; note = 2'-O-methylguanosine-3'-phosphate
  modified_base 14: mod_base = OTHER; note = 2'-deoxy-2'-fluorouridine-3'-phosphate
  modified_base 15: mod_base = OTHER; note = 2'-O-methylguanosine-3'-phosphate
  modified_base 16: mod_base = OTHER; note = 2'-deoxy-2'-fluorocytidine-3'-phosphate
  modified_base 17: mod_base = OTHER; note = 2'-O-methyluridine-3'-phosphate
  modified_base 18: mod_base = OTHER; note = 2'-O-methylguanosine-3'-phosphate
  modified_base 19: mod_base = OTHER; note = 2'-O-methylcytidine-3'-phosphate
  modified_base 20: mod_base = OTHER; note = 2'-O-methyladenosine-3'-phosphate
  modified_base 21: mod_base = OTHER; note = 2'-O-methylguanosine-3'-phosphorothioate
  modified_base 22: mod_base = OTHER; note = 2'-O-methyluridine-3'-phosphorothioate
  modified_base 23: mod_base = OTHER; note = 2'-O-methyluridine
tcgggtctgaacgtgctgcagtt

SEQ ID NO: 1501 - RNA, 23 nt, synthetic construct
  source 1..23: mol_type = other RNA
  modified_base 1: mod_base = OTHER; note = 2'-O-methyluridine-3'-phosphorothioate 5'-(E)-Vinylphosphonate
  modified_base 2: mod_base = OTHER; note = 2'-deoxy-2'-fluorouridine-3'-phosphorothioate
  modified_base 3: mod_base = OTHER; note = 2'-O-methyladenosine-3'-phosphate
  modified_base 4: mod_base = OTHER; note = 2'-O-methyluridine-3'-phosphate
  modified_base 5: mod_base = OTHER; note = 2'-O-methylcytidine-3'-phosphate
  modified_base 6: mod_base = OTHER; note = 2'-deoxy-2'-fluorocytidine-3'-phosphate
  modified_base 7: mod_base = OTHER; note = 2'-O-methyladenosine-3'-phosphate
  modified_base 8: mod_base = OTHER; note = 2'-deoxy-2'-fluorocytidine-3'-phosphate
  modified_base 9: mod_base = OTHER; note = 2'-deoxy-2'-fluoroguanosine-3'-phosphate
  modified_base 10: mod_base = OTHER; note = 2'-O-methylguanosine-3'-phosphate
  modified_base 11: mod_base = OTHER; note = 2'-O-methylguanosine-3'-phosphate
  modified_base 12: mod_base = OTHER; note = 2'-O-methyluridine-3'-phosphate
  modified_base 13: mod_base = OTHER; note = 2'-O-methylcytidine-3'-phosphate
  modified_base 14: mod_base = OTHER; note = 2'-deoxy-2'-fluorouridine-3'-phosphate
  modified_base 15: mod_base = OTHER; note = 2'-O-methylguanosine-3'-phosphate
  modified_base 16: mod_base = OTHER; note = 2'-deoxy-2'-fluoroadenosine-3'-phosphate
  modified_base 17: mod_base = OTHER; note = 2'-O-methyladenosine-3'-phosphate
  modified_base 18: mod_base = OTHER; note = 2'-O-methylcytidine-3'-phosphate
  modified_base 19: mod_base = OTHER; note = 2'-O-methylguanosine-3'-phosphate
  modified_base 20: mod_base = OTHER; note = 2'-O-methyluridine-3'-phosphate
  modified_base 21: mod_base = OTHER; note = 2'-O-methylguanosine-3'-phosphorothioate
  modified_base 22: mod_base = OTHER; note = 2'-O-methylcytidine-3'-phosphorothioate
  modified_base 23: mod_base = OTHER; note = 2'-O-methyluridine
ttatccacgggtctgaacgtgct

SEQ ID NO: 1502 - RNA, 23 nt, synthetic construct
  source 1..23: mol_type = other RNA
  modified_base 1: mod_base = OTHER; note = 2'-O-methyluridine-3'-phosphorothioate 5'-(E)-Vinylphosphonate
  modified_base 2: mod_base = OTHER; note = 2'-deoxy-2'-fluorouridine-3'-phosphorothioate
  modified_base 3: mod_base = OTHER; note = 2'-O-methyluridine-3'-phosphate
  modified_base 4: mod_base = OTHER; note = 2'-O-methylguanosine-3'-phosphate
  modified_base 5: mod_base = OTHER; note = 2'-O-methylguanosine-3'-phosphate
  modified_base 6: mod_base = OTHER; note = 2'-deoxy-2'-fluorouridine-3'-phosphate
  modified_base 7: mod_base = OTHER; note = 2'-O-methyladenosine-3'-phosphate
  modified_base 8: mod_base = OTHER; note = 2'-deoxy-2'-fluorouridine-3'-phosphate
  modified_base 9: mod_base = OTHER; note = 2'-deoxy-2'-fluoroadenosine-3'-phosphate
  modified_base 10: mod_base = OTHER; note = 2'-O-methyluridine-3'-phosphate
  modified_base 11: mod_base = OTHER; note = 2'-O-methylcytidine-3'-phosphate
  modified_base 12: mod_base = OTHER; note = 2'-O-methylcytidine-3'-phosphate
  modified_base 13: mod_base = OTHER; note = 2'-O-methyladenosine-3'-phosphate
  modified_base 14: mod_base = OTHER; note = 2'-deoxy-2'-fluorocytidine-3'-phosphate
  modified_base 15: mod_base = OTHER; note = 2'-O-methylguanosine-3'-phosphate
  modified_base 16: mod_base = OTHER; note = 2'-deoxy-2'-fluoroguanosine-3'-phosphate
  modified_base 17: mod_base = OTHER; note = 2'-O-methylguanosine-3'-phosphate
  modified_base 18: mod_base = OTHER; note = 2'-O-methyluridine-3'-phosphate
  modified_base 19: mod_base = OTHER; note = 2'-O-methylcytidine-3'-phosphate
  modified_base 20: mod_base = OTHER; note = 2'-O-methyluridine-3'-phosphate
  modified_base 21: mod_base = OTHER; note = 2'-O-methylguanosine-3'-phosphorothioate
  modified_base 22: mod_base = OTHER; note = 2'-O-methyladenosine-3'-phosphorothioate
  modified_base 23: mod_base = OTHER; note = 2'-O-methyladenosine
tttggtatatccacgggtctgaa

SEQ ID NO: 1503 - RNA, 23 nt, synthetic construct
  source 1..23: mol_type = other RNA
  modified_base 1: mod_base = OTHER; note = 2'-O-methyluridine-3'-phosphorothioate 5'-(E)-Vinylphosphonate
  modified_base 2: mod_base = OTHER; note = 2'-deoxy-2'-fluoroguanosine-3'-phosphorothioate
  modified_base 3: mod_base = OTHER; note = 2'-O-methyladenosine-3'-phosphate
  modified_base 4: mod_base = OTHER; note = 2'-O-methylcytidine-3'-phosphate
  modified_base 5: mod_base = OTHER; note = 2'-O-methyluridine-3'-phosphate
  modified_base 6: mod_base = OTHER; note = 2'-deoxy-2'-fluorocytidine-3'-phosphate
  modified_base 7: mod_base = OTHER; note = 2'-O-methyluridine-3'-phosphate
  modified_base 8: mod_base = OTHER; note = 2'-deoxy-2'-fluorouridine-3'-phosphate
  modified_base 9: mod_base = OTHER; note = 2'-deoxy-2'-fluoroguanosine-3'-phosphate
  modified_base 10: mod_base = OTHER; note = 2'-O-methylguanosine-3'-phosphate
  modified_base 11: mod_base = OTHER; note = 2'-O-methyluridine-3'-phosphate
  modified_base 12: mod_base = OTHER; note = 2'-O-methyladenosine-3'-phosphate
  modified_base 13: mod_base = OTHER; note = 2'-O-methyluridine-3'-phosphate
  modified_base 14: mod_base = OTHER; note = 2'-deoxy-2'-fluoroadenosine-3'-phosphate
  modified_base 15: mod_base = OTHER; note = 2'-O-methyluridine-3'-phosphate
  modified_base 16: mod_base = OTHER; note = 2'-deoxy-2'-fluorocytidine-3'-phosphate
  modified_base 17: mod_base = OTHER; note = 2'-O-methylcytidine-3'-phosphate
  modified_base 18: mod_base = OTHER; note = 2'-O-methyladenosine-3'-phosphate
  modified_base 19: mod_base = OTHER; note = 2'-O-methylcytidine-3'-phosphate
  modified_base 20: mod_base = OTHER; note = 2'-O-methylguanosine-3'-phosphate
  modified_base 21: mod_base = OTHER; note = 2'-O-methylguanosine-3'-phosphorothioate
  modified_base 22: mod_base = OTHER; note = 2'-O-methylguanosine-3'-phosphorothioate
  modified_base 23: mod_base = OTHER; note = 2'-O-methyluridine
tgactcttggtatatccacgggt

SEQ ID NO: 1504 - RNA, 23 nt, synthetic construct
  source 1..23: mol_type = other RNA
  modified_base 1: mod_base = OTHER; note = 2'-O-methyluridine-3'-phosphorothioate 5'-(E)-Vinylphosphonate
  modified_base 2: mod_base = OTHER; note = 2'-deoxy-2'-fluoroguanosine-3'-phosphorothioate
  modified_base 3: mod_base = OTHER; note = 2'-O-methyluridine-3'-phosphate
  modified_base 4: mod_base = OTHER; note = 2'-O-methyluridine-3'-phosphate
  modified_base 5: mod_base = OTHER; note = 2'-O-methylguanosine-3'-phosphate
  modified_base 6: mod_base = OTHER; note = 2'-deoxy-2'-fluoroguanosine-3'-phosphate
  modified_base 7: mod_base = OTHER; note = 2'-O-methylguanosine-3'-phosphate
  modified_base 8: mod_base = OTHER; note = 2'-deoxy-2'-fluoroadenosine-3'-phosphate
  modified_base 9: mod_base = OTHER; note = 2'-deoxy-2'-fluorocytidine-3'-phosphate
  modified_base 10: mod_base = OTHER; note = 2'-O-methyluridine-3'-phosphate
  modified_base 11: mod_base = OTHER; note = 2'-O-methylcytidine-3'-phosphate
  modified_base 12: mod_base = OTHER; note = 2'-O-methyluridine-3'-phosphate
  modified_base 13: mod_base = OTHER; note = 2'-O-methyluridine-3'-phosphate
  modified_base 14: mod_base = OTHER; note = 2'-deoxy-2'-fluoroguanosine-3'-phosphate
  modified_base 15: mod_base = OTHER; note = 2'-O-methylguanosine-3'-phosphate
  modified_base 16: mod_base = OTHER; note = 2'-deoxy-2'-fluorouridine-3'-phosphate
  modified_base 17: mod_base = OTHER; note = 2'-O-methyladenosine-3'-phosphate
  modified_base 18: mod_base = OTHER; note = 2'-O-methyluridine-3'-phosphate
  modified_base 19: mod_base = OTHER; note = 2'-O-methyladenosine-3'-phosphate
  modified_base 20: mod_base = OTHER; note = 2'-O-methyluridine-3'-phosphate
  modified_base 21: mod_base = OTHER; note = 2'-O-methylcytidine-3'-phosphorothioate
  modified_base 22: mod_base = OTHER; note = 2'-O-methylcytidine-3'-phosphorothioate
  modified_base 23: mod_base = OTHER; note = 2'-O-methyladenosine
tgttgggactcttggtatatcca

SEQ ID NO: 1505 - RNA, 23 nt, synthetic construct
  source 1..23: mol_type = other RNA
  modified_base 1: mod_base = OTHER; note = 2'-O-methyluridine-3'-phosphorothioate 5'-(E)-Vinylphosphonate
  modified_base 2: mod_base = OTHER; note = 2'-deoxy-2'-fluoroadenosine-3'-phosphorothioate
  modified_base 3: mod_base = OTHER; note = 2'-O-methylguanosine-3'-phosphate
  modified_base 4: mod_base = OTHER; note = 2'-O-methyluridine-3'-phosphate
  modified_base 5: mod_base = OTHER; note = 2'-O-methyluridine-3'-phosphate
  modified_base 6: mod_base = OTHER; note = 2'-deoxy-2'-fluoroguanosine-3'-phosphate
  modified_base 7: mod_base = OTHER; note = 2'-O-methylguanosine-3'-phosphate
  modified_base 8: mod_base = OTHER; note = 2'-deoxy-2'-fluorouridine-3'-phosphate
  modified_base 9: mod_base = OTHER; note = 2'-deoxy-2'-fluorouridine-3'-phosphate
  modified_base 10: mod_base = OTHER; note = 2'-O-methylguanosine-3'-phosphate
  modified_base 11: mod_base = OTHER; note = 2'-O-methylguanosine-3'-phosphate
  modified_base 12: mod_base = OTHER; note = 2'-O-methylguanosine-3'-phosphate
  modified_base 13: mod_base = OTHER; note = 2'-O-methyladenosine-3'-phosphate
  modified_base 14: mod_base = OTHER; note = 2'-deoxy-2'-fluorocytidine-3'-phosphate
  modified_base 15: mod_base = OTHER; note = 2'-O-methyluridine-3'-phosphate
  modified_base 16: mod_base = OTHER; note = 2'-deoxy-2'-fluorocytidine-3'-phosphate
  modified_base 17: mod_base = OTHER; note = 2'-O-methyluridine-3'-phosphate
  modified_base 18: mod_base = OTHER; note = 2'-O-methyluridine-3'-phosphate
  modified_base 19: mod_base = OTHER; note = 2'-O-methylguanosine-3'-phosphate
  modified_base 20: mod_base = OTHER; note = 2'-O-methylguanosine-3'-phosphate
  modified_base 21: mod_base = OTHER; note = 2'-O-methyluridine-3'-phosphorothioate
  modified_base 22: mod_base = OTHER; note = 2'-O-methyladenosine-3'-phosphorothioate
  modified_base 23: mod_base = OTHER; note = 2'-O-methyluridine
tagttggttgggactcttggtat

SEQ ID NO: 1506 - RNA, 23 nt, synthetic construct
  source 1..23: mol_type = other RNA
  modified_base 1: mod_base = OTHER; note = 2'-O-methyluridine-3'-phosphorothioate 5'-(E)-Vinylphosphonate
  modified_base 2: mod_base = OTHER; note = 2'-deoxy-2'-fluoroguanosine-3'-phosphorothioate
  modified_base 3: mod_base = OTHER; note = 2'-O-methyluridine-3'-phosphate
  modified_base 4: mod_base = OTHER; note = 2'-O-methylguanosine-3'-phosphate
  modified_base 5: mod_base = OTHER; note = 2'-O-methyladenosine-3'-phosphate
  modified_base 6: mod_base = OTHER; note = 2'-deoxy-2'-fluorocytidine-3'-phosphate
  modified_base 7: mod_base = OTHER; note = 2'-O-methylcytidine-3'-phosphate
  modified_base 8: mod_base = OTHER; note = 2'-deoxy-2'-fluoroadenosine-3'-phosphate
  modified_base 9: mod_base = OTHER; note = 2'-deoxy-2'-fluoroguanosine-3'-phosphate
  modified_base 10: mod_base = OTHER; note = 2'-O-methyluridine-3'-phosphate
  modified_base 11: mod_base = OTHER; note = 2'-O-methyluridine-3'-phosphate
  modified_base 12: mod_base = OTHER; note = 2'-O-methylguanosine-3'-phosphate
  modified_base 13: mod_base = OTHER; note = 2'-O-methylguanosine-3'-phosphate
  modified_base 14: mod_base = OTHER; note = 2'-deoxy-2'-fluorouridine-3'-phosphate
  modified_base 15: mod_base = OTHER; note = 2'-O-methyluridine-3'-phosphate
  modified_base 16: mod_base = OTHER; note = 2'-deoxy-2'-fluoroguanosine-3'-phosphate
  modified_base 17: mod_base = OTHER; note = 2'-O-methylguanosine-3'-phosphate
  modified_base 18: mod_base = OTHER; note = 2'-O-methylguanosine-3'-phosphate
  modified_base 19: mod_base = OTHER; note = 2'-O-methyladenosine-3'-phosphate
  modified_base 20: mod_base = OTHER; note = 2'-O-methylcytidine-3'-phosphate
  modified_base 21: mod_base = OTHER; note = 2'-O-methyluridine-3'-phosphorothioate
  modified_base 22: mod_base = OTHER; note = 2'-O-methylcytidine-3'-phosphorothioate
  modified_base 23: mod_base = OTHER; note = 2'-O-methyluridine
tgtgaccagttggttgggactct

SEQ ID NO: 1507 - RNA, 23 nt, synthetic construct
  source 1..23: mol_type = other RNA
  modified_base 1: mod_base = OTHER; note = 2'-O-methyluridine-3'-phosphorothioate 5'-(E)-Vinylphosphonate
  modified_base 2: mod_base = OTHER; note = 2'-deoxy-2'-fluoroadenosine-3'-phosphorothioate
  modified_base 3: mod_base = OTHER; note = 2'-O-methylcytidine-3'-phosphate
  modified_base 4: mod_base = OTHER; note = 2'-O-methylguanosine-3'-phosphate
  modified_base 5: mod_base = OTHER; note = 2'-O-methyladenosine-3'-phosphate
  modified_base 6: mod_base = OTHER; note = 2'-deoxy-2'-fluoroguanosine-3'-phosphate
  modified_base 7: mod_base = OTHER; note = 2'-O-methylcytidine-3'-phosphate
  modified_base 8: mod_base = OTHER; note = 2'-deoxy-2'-fluorouridine-3'-phosphate
  modified_base 9: mod_base = OTHER; note = 2'-deoxy-2'-fluoroguanosine-3'-phosphate
  modified_base 10: mod_base = OTHER; note = 2'-O-methylguanosine-3'-phosphate
  modified_base 11: mod_base = OTHER; note = 2'-O-methyladenosine-3'-phosphate
  modified_base 12: mod_base = OTHER; note = 2'-O-methylguanosine-3'-phosphate
  modified_base 13: mod_base = OTHER; note = 2'-O-methyluridine-3'-phosphate
  modified_base 14: mod_base = OTHER; note = 2'-deoxy-2'-fluorocytidine-3'-phosphate
  modified_base 15: mod_base = OTHER; note = 2'-O-methylguanosine-3'-phosphate
  modified_base 16: mod_base = OTHER; note = 2'-deoxy-2'-fluoroguanosine-3'-phosphate
  modified_base 17: mod_base = OTHER; note = 2'-O-methylcytidine-3'-phosphate
  modified_base 18: mod_base = OTHER; note = 2'-O-methyluridine-3'-phosphate
  modified_base 19: mod_base = OTHER; note = 2'-O-methyluridine-3'-phosphate
  modified_base 20: mod_base = OTHER; note = 2'-O-methylguanosine-3'-phosphate
  modified_base 21: mod_base = OTHER; note = 2'-O-methylcytidine-3'-phosphorothioate
  modified_base 22: mod_base = OTHER; note = 2'-O-methyluridine-3'-phosphorothioate
  modified_base 23: mod_base = OTHER; note = 2'-O-methylguanosine
tacgagctggagtcggcttgctg

SEQ ID NO: 1508 - RNA, 23 nt, synthetic construct
  source 1..23: mol_type = other RNA
  modified_base 1: mod_base = OTHER; note = 2'-O-methyluridine-3'-phosphorothioate 5'-(E)-Vinylphosphonate
  modified_base 2: mod_base = OTHER; note = 2'-deoxy-2'-fluoroguanosine-3'-phosphorothioate
  modified_base 3: mod_base = OTHER; note = 2'-O-methylcytidine-3'-phosphate
  modified_base 4: mod_base = OTHER; note = 2'-O-methyluridine-3'-phosphate
  modified_base 5: mod_base = OTHER; note = 2'-O-methylguanosine-3'-phosphate
  modified_base 6: mod_base = OTHER; note = 2'-deoxy-2'-fluoroadenosine-3'-phosphate
  modified_base 7: mod_base = OTHER; note = 2'-O-methyluridine-3'-phosphate
  modified_base 8: mod_base = OTHER; note = 2'-deoxy-2'-fluoroadenosine-3'-phosphate
  modified_base 9: mod_base = OTHER; note = 2'-deoxy-2'-fluorocytidine-3'-phosphate
  modified_base 10: mod_base = OTHER; note = 2'-O-methylguanosine-3'-phosphate
  modified_base 11: mod_base = OTHER; note = 2'-O-methyladenosine-3'-phosphate
  modified_base 12: mod_base = OTHER; note = 2'-O-methylguanosine-3'-phosphate
  modified_base 13: mod_base = OTHER; note = 2'-O-methylcytidine-3'-phosphate
  modified_base 14: mod_base = OTHER; note = 2'-deoxy-2'-fluorouridine-3'-phosphate
  modified_base 15: mod_base = OTHER; note = 2'-O-methylguanosine-3'-phosphate
  modified_base 16: mod_base = OTHER; note = 2'-deoxy-2'-fluoroguanosine-3'-phosphate
  modified_base 17: mod_base = OTHER; note = 2'-O-methyladenosine-3'-phosphate
  modified_base 18: mod_base = OTHER; note = 2'-O-methylguanosine-3'-phosphate
  modified_base 19: mod_base = OTHER; note = 2'-O-methyluridine-3'-phosphate
  modified_base 20: mod_base = OTHER; note = 2'-O-methylcytidine-3'-phosphate
  modified_base 21: mod_base = OTHER; note = 2'-O-methylguanosine-3'-phosphorothioate
  modified_base 22: mod_base = OTHER; note = 2'-O-methylguanosine-3'-phosphorothioate
  modified_base 23: mod_base = OTHER; note = 2'-O-methylcytidine
tgctgatacgagctggagtcggc

SEQ ID NO: 1509 - RNA, 23 nt, synthetic construct
  source 1..23: mol_type = other RNA
  modified_base 1: mod_base = OTHER; note = 2'-O-methyluridine-3'-phosphorothioate 5'-(E)-Vinylphosphonate
  modified_base 2: mod_base = OTHER; note = 2'-deoxy-2'-fluoroadenosine-3'-phosphorothioate
  modified_base 3: mod_base = OTHER; note = 2'-O-methylguanosine-3'-phosphate
  modified_base 4: mod_base = OTHER; note = 2'-O-methylguanosine-3'-phosphate
  modified_base 5: mod_base = OTHER; note = 2'-O-methyluridine-3'-phosphate
  modified_base 6: mod_base = OTHER; note = 2'-deoxy-2'-fluorouridine-3'-phosphate
  modified_base 7: mod_base = OTHER; note = 2'-O-methylguanosine-3'-phosphate
  modified_base 8: mod_base = OTHER; note = 2'-deoxy-2'-fluoroadenosine-3'-phosphate
  modified_base 9: mod_base = OTHER; note = 2'-deoxy-2'-fluorouridine-3'-phosphate
  modified_base 10: mod_base = OTHER; note = 2'-O-methylguanosine-3'-phosphate
  modified_base 11: mod_base = OTHER; note = 2'-O-methylguanosine-3'-phosphate
  modified_base 12: mod_base = OTHER; note = 2'-O-methylcytidine-3'-phosphate
  modified_base 13: mod_base = OTHER; note = 2'-O-methyluridine-3'-phosphate
  modified_base 14: mod_base = OTHER; note = 2'-deoxy-2'-fluoroguanosine-3'-phosphate
  modified_base 15: mod_base = OTHER; note = 2'-O-methyladenosine-3'-phosphate
  modified_base 16: mod_base = OTHER; note = 2'-deoxy-2'-fluorouridine-3'-phosphate
  modified_base 17: mod_base = OTHER; note = 2'-O-methyladenosine-3'-phosphate
  modified_base 18: mod_base = OTHER; note = 2'-O-methylcytidine-3'-phosphate
  modified_base 19: mod_base = OTHER; note = 2'-O-methylguanosine-3'-phosphate
  modified_base 20: mod_base = OTHER; note = 2'-O-methyladenosine-3'-phosphate
  modified_base 21: mod_base = OTHER; note = 2'-O-methylguanosine-3'-phosphorothioate
  modified_base 22: mod_base = OTHER; note = 2'-O-methylcytidine-3'-phosphorothioate
  modified_base 23: mod_base = OTHER; note = 2'-O-methyluridine
taggttgatggctgatacgagct

SEQ ID NO: 1510 - RNA, 23 nt, synthetic construct
  source 1..23: mol_type = other RNA
  modified_base 1: mod_base = OTHER; note = 2'-O-methyluridine-3'-phosphorothioate 5'-(E)-Vinylphosphonate
  modified_base 2: mod_base = OTHER; note = 2'-deoxy-2'-fluorocytidine-3'-phosphorothioate
  modified_base 3: mod_base = OTHER; note = 2'-O-methyladenosine-3'-phosphate
  modified_base 4: mod_base = OTHER; note = 2'-O-methylguanosine-3'-phosphate
  modified_base 5: mod_base = OTHER; note = 2'-O-methyluridine-3'-phosphate
  modified_base 6: mod_base = OTHER; note = 2'-deoxy-2'-fluoroguanosine-3'-phosphate
  modified_base 7: mod_base = OTHER; note = 2'-O-methylguanosine-3'-phosphate
  modified_base 8: mod_base = OTHER; note = 2'-deoxy-2'-fluoroadenosine-3'-phosphate
  modified_base 9: mod_base = OTHER; note = 2'-deoxy-2'-fluoroguanosine-3'-phosphate
  modified_base 10: mod_base = OTHER; note = 2'-O-methyladenosine-3'-phosphate
  modified_base 11: mod_base = OTHER; note = 2'-O-methylguanosine-3'-phosphate
  modified_base 12: mod_base = OTHER; note = 2'-O-methylguanosine-3'-phosphate
  modified_base 13: mod_base = OTHER; note = 2'-O-methyluridine-3'-phosphate
  modified_base 14: mod_base = OTHER; note = 2'-deoxy-2'-fluorouridine-3'-phosphate
  modified_base 15: mod_base = OTHER; note = 2'-O-methylguanosine-3'-phosphate
  modified_base 16: mod_base = OTHER; note = 2'-deoxy-2'-fluoroadenosine-3'-phosphate
  modified_base 17: mod_base = OTHER; note = 2'-O-methyluridine-3'-phosphate
  modified_base 18: mod_base = OTHER; note = 2'-O-methylguanosine-3'-phosphate
  modified_base 19: mod_base = OTHER; note = 2'-O-methylguanosine-3'-phosphate
  modified_base 20: mod_base = OTHER; note = 2'-O-methylcytidine-3'-phosphate
  modified_base 21: mod_base = OTHER; note = 2'-O-methyluridine-3'-phosphorothioate
  modified_base 22: mod_base = OTHER; note = 2'-O-methylguanosine-3'-phosphorothioate
  modified_base 23: mod_base = OTHER; note = 2'-O-methyladenosine
tcagtggagaggttgatggctga

SEQ ID NO: 1511 - RNA, 23 nt, synthetic construct
  source 1..23: mol_type = other RNA
  modified_base 1: mod_base = OTHER; note = 2'-O-methyluridine-3'-phosphorothioate 5'-(E)-Vinylphosphonate
  modified_base 2: mod_base = OTHER; note = 2'-deoxy-2'-fluorocytidine-3'-phosphorothioate
  modified_base 3: mod_base = OTHER; note = 2'-O-methyluridine-3'-phosphate
  modified_base 4: mod_base = OTHER; note = 2'-O-methyluridine-3'-phosphate
  modified_base 5: mod_base = OTHER; note = 2'-O-methylguanosine-3'-phosphate
  modified_base 6: mod_base = OTHER; note = 2'-deoxy-2'-fluoroguanosine-3'-phosphate
  modified_base 7: mod_base = OTHER; note = 2'-O-methylcytidine-3'-phosphate
  modified_base 8: mod_base = OTHER; note = 2'-deoxy-2'-fluoroadenosine-3'-phosphate
  modified_base 9: mod_base = OTHER; note = 2'-deoxy-2'-fluoroguanosine-3'-phosphate
  modified_base 10: mod_base = OTHER; note = 2'-O-methyluridine-3'-phosphate
  modified_base 11: mod_base = OTHER; note = 2'-O-methylguanosine-3'-phosphate
  modified_base 12: mod_base = OTHER; note = 2'-O-methylguanosine-3'-phosphate
  modified_base 13: mod_base = OTHER; note = 2'-O-methyladenosine-3'-phosphate
  modified_base 14: mod_base = OTHER; note = 2'-deoxy-2'-fluoroguanosine-3'-phosphate
  modified_base 15: mod_base = OTHER; note = 2'-O-methyladenosine-3'-phosphate
  modified_base 16: mod_base = OTHER; note = 2'-deoxy-2'-fluoroguanosine-3'-phosphate
  modified_base 17: mod_base = OTHER; note = 2'-O-methylguanosine-3'-phosphate
  modified_base 18: mod_base = OTHER; note = 2'-O-methyluridine-3'-phosphate
  modified_base 19: mod_base = OTHER; note = 2'-O-methyluridine-3'-phosphate
  modified_base 20: mod_base = OTHER; note = 2'-O-methylguanosine-3'-phosphate
  modified_base 21: mod_base = OTHER; note = 2'-O-methyladenosine-3'-phosphorothioate
  modified_base 22: mod_base = OTHER; note = 2'-O-methyluridine-3'-phosphorothioate
  modified_base 23: mod_base = OTHER; note = 2'-O-methylguanosine
tcttggcagtggagaggttgatg

SEQ ID NO: 1512 - RNA, 23 nt, synthetic construct
  source 1..23: mol_type = other RNA
  modified_base 1: mod_base = OTHER; note = 2'-O-methyluridine-3'-phosphorothioate 5'-(E)-Vinylphosphonate
  modified_base 2: mod_base = OTHER; note = 2'-deoxy-2'-fluoroguanosine-3'-phosphorothioate
  modified_base 3: mod_base = OTHER; note = 2'-O-methyladenosine-3'-phosphate
  modified_base 4: mod_base = OTHER; note = 2'-O-methyladenosine-3'-phosphate
  modified_base 5: mod_base = OTHER; note = 2'-O-methyluridine-3'-phosphate
  modified_base 6: mod_base = OTHER; note = 2'-deoxy-2'-fluorocytidine-3'-phosphate
  modified_base 7: mod_base = OTHER; note = 2'-O-methylcytidine-3'-phosphate
  modified_base 8: mod_base = OTHER; note = 2'-deoxy-2'-fluorouridine-3'-phosphate
  modified_base 9: mod_base = OTHER; note = 2'-deoxy-2'-fluorouridine-3'-phosphate
  modified_base 10: mod_base = OTHER; note = 2'-O-methylguanosine-3'-phosphate
  modified_base 11: mod_base = OTHER; note = 2'-O-methylguanosine-3'-phosphate
  modified_base 12: mod_base = OTHER; note = 2'-O-methylcytidine-3'-phosphate
  modified_base 13: mod_base = OTHER; note = 2'-O-methyladenosine-3'-phosphate
  modified_base 14: mod_base = OTHER; note = 2'-deoxy-2'-fluoroguanosine-3'-phosphate
  modified_base 15: mod_base = OTHER; note = 2'-O-methyluridine-3'-phosphate
  modified_base 16: mod_base = OTHER; note = 2'-deoxy-2'-fluoroguanosine-3'-phosphate
  modified_base 17: mod_base = OTHER; note = 2'-O-methylguanosine-3'-phosphate
  modified_base 18: mod_base = OTHER; note = 2'-O-methyladenosine-3'-phosphate
  modified_base 19: mod_base = OTHER; note = 2'-O-methylguanosine-3'-phosphate
  modified_base 20: mod_base = OTHER; note = 2'-O-methyladenosine-3'-phosphate
  modified_base 21: mod_base = OTHER; note = 2'-O-methylguanosine-3'-phosphorothioate
  modified_base 22: mod_base = OTHER; note = 2'-O-methylguanosine-3'-phosphorothioate
  modified_base 23: mod_base = OTHER; note = 2'-O-methyluridine
tgaatccttggcagtggagaggt

SEQ ID NO: 1513 - RNA, 23 nt, synthetic construct
  source 1..23: mol_type = other RNA
  modified_base 1: mod_base = OTHER; note = 2'-O-methyluridine-3'-phosphorothioate 5'-(E)-Vinylphosphonate
  modified_base 2: mod_base = OTHER; note = 2'-deoxy-2'-fluorocytidine-3'-phosphorothioate
  modified_base 3: mod_base = OTHER; note = 2'-O-methylguanosine-3'-phosphate
  modified_base 4: mod_base = OTHER; note = 2'-O-methylguanosine-3'-phosphate
  modified_base 5: mod_base = OTHER; note = 2'-O-methylcytidine-3'-phosphate
  modified_base 6: mod_base = OTHER; note = 2'-deoxy-2'-fluorouridine-3'-phosphate
  modified_base 7: mod_base = OTHER; note = 2'-O-methyluridine-3'-phosphate
  modified_base 8: mod_base = OTHER; note = 2'-deoxy-2'-fluorouridine-3'-phosphate
  modified_base 9: mod_base = OTHER; note = 2'-deoxy-2'-fluoroguanosine-3'-phosphate
  modified_base 10: mod_base = OTHER; note = 2'-O-methylguanosine-3'-phosphate
  modified_base 11: mod_base = OTHER; note = 2'-O-methyladenosine-3'-phosphate
  modified_base 12: mod_base = OTHER; note = 2'-O-methyladenosine-3'-phosphate
  modified_base 13: mod_base = OTHER; note = 2'-O-methyluridine-3'-phosphate
  modified_base 14: mod_base = OTHER; note = 2'-deoxy-2'-fluorocytidine-3'-phosphate
  modified_base 15: mod_base = OTHER; note = 2'-O-methylcytidine-3'-phosphate
  modified_base 16: mod_base = OTHER; note = 2'-deoxy-2'-fluorouridine-3'-phosphate
  modified_base 17: mod_base = OTHER; note = 2'-O-methyluridine-3'-phosphate
  modified_base 18: mod_base = OTHER; note = 2'-O-methylguanosine-3'-phosphate
  modified_base 19: mod_base = OTHER; note = 2'-O-methylguanosine-3'-phosphate
  modified_base 20: mod_base = OTHER; note = 2'-O-methylcytidine-3'-phosphate
  modified_base 21: mod_base = OTHER; note = 2'-O-methyladenosine-3'-phosphorothioate
  modified_base 22: mod_base = OTHER; note = 2'-O-methylguanosine-3'-phosphorothioate
  modified_base 23: mod_base = OTHER; note = 2'-O-methyluridine
tcggctttggaatccttggcagt

SEQ ID NO: 1514 - RNA, 23 nt, synthetic construct
  source 1..23: mol_type = other RNA
  modified_base 1: mod_base = OTHER; note = 2'-O-methyluridine-3'-phosphorothioate 5'-(E)-Vinylphosphonate
  modified_base 2: mod_base = OTHER; note = 2'-deoxy-2'-fluoroguanosine-3'-phosphorothioate
  modified_base 3: mod_base = OTHER; note = 2'-O-methyluridine-3'-phosphate
  modified_base 4: mod_base = OTHER; note = 2'-O-methylguanosine-3'-phosphate
  modified_base 5: mod_base = OTHER; note = 2'-O-methyladenosine-3'-phosphate
  modified_base 6: mod_base = OTHER; note = 2'-deoxy-2'-fluorocytidine-3'-phosphate
  modified_base 7: mod_base = OTHER; note = 2'-O-methylcytidine-3'-phosphate
  modified_base 8: mod_base = OTHER; note = 2'-deoxy-2'-fluoroadenosine-3'-phosphate
  modified_base 9: mod_base = OTHER; note = 2'-deoxy-2'-fluorocytidine-3'-phosphate
  modified_base 10: mod_base = OTHER; note = 2'-O-methylguanosine-3'-phosphate
  modified_base 11: mod_base = OTHER; note = 2'-O-methylguanosine-3'-phosphate
  modified_base 12: mod_base = OTHER; note = 2'-O-methylcytidine-3'-phosphate
  modified_base 13: mod_base = OTHER; note = 2'-O-methyluridine-3'-phosphate
  modified_base 14: mod_base = OTHER; note = 2'-deoxy-2'-fluorouridine-3'-phosphate
  modified_base 15: mod_base = OTHER; note = 2'-O-methyluridine-3'-phosphate
  modified_base 16: mod_base = OTHER; note = 2'-deoxy-2'-fluoroguanosine-3'-phosphate
  modified_base 17: mod_base = OTHER; note = 2'-O-methylguanosine-3'-phosphate
  modified_base 18: mod_base = OTHER; note = 2'-O-methyladenosine-3'-phosphate
  modified_base 19: mod_base = OTHER; note = 2'-O-methyladenosine-3'-phosphate
  modified_base 20: mod_base = OTHER; note = 2'-O-methyluridine-3'-phosphate
  modified_base 21: mod_base = OTHER; note = 2'-O-methylcytidine-3'-phosphorothioate
  modified_base 22: mod_base = OTHER; note = 2'-O-methylcytidine-3'-phosphorothioate
  modified_base 23: mod_base = OTHER; note = 2'-O-methyluridine
tgtgaccacggctttggaatcct

SEQ ID NO: 1515 - RNA, 23 nt, synthetic construct
  source 1..23: mol_type = other RNA
  modified_base 1: mod_base = OTHER; note = 2'-O-methyluridine-3'-phosphorothioate 5'-(E)-Vinylphosphonate
  modified_base 2: mod_base = OTHER; note = 2'-deoxy-2'-fluoroadenosine-3'-phosphorothioate
  modified_base 3: mod_base = OTHER; note = 2'-O-methylcytidine-3'-phosphate
  modified_base 4: mod_base = OTHER; note = 2'-O-methyladenosine-3'-phosphate
  modified_base 5: mod_base = OTHER; note = 2'-O-methylcytidine-3'-phosphate
  modified_base 6: mod_base = OTHER; note = 2'-deoxy-2'-fluoroadenosine-3'-phosphate
  modified_base 7: mod_base = OTHER; note = 2'-O-methylguanosine-3'-phosphate
  modified_base 8: mod_base = OTHER; note = 2'-deoxy-2'-fluoroguanosine-3'-phosphate
  modified_base 9: mod_base = OTHER; note = 2'-deoxy-2'-fluorouridine-3'-phosphate
  modified_base 10: mod_base = OTHER; note = 2'-O-methylguanosine-3'-phosphate
  modified_base 11: mod_base = OTHER; note = 2'-O-methyladenosine-3'-phosphate
  modified_base 12: mod_base = OTHER; note = 2'-O-methylcytidine-3'-phosphate
  modified_base 13: mod_base = OTHER; note = 2'-O-methylcytidine-3'-phosphate
  modified_base 14: mod_base = OTHER; note = 2'-deoxy-2'-fluoroadenosine-3'-phosphate
  modified_base 15: mod_base = OTHER; note = 2'-O-methylcytidine-3'-phosphate
  modified_base 16: mod_base = OTHER; note = 2'-deoxy-2'-fluoroguanosine-3'-phosphate
  modified_base 17: mod_base = OTHER; note = 2'-O-methylguanosine-3'-phosphate
  modified_base 18: mod_base = OTHER; note = 2'-O-methylcytidine-3'-phosphate
  modified_base 19: mod_base = OTHER; note = 2'-O-methyluridine-3'-phosphate
  modified_base 20: mod_base = OTHER; note = 2'-O-methyluridine-3'-phosphate
  modified_base 21: mod_base = OTHER; note = 2'-O-methyluridine-3'-phosphorothioate
  modified_base 22: mod_base = OTHER; note = 2'-O-methylguanosine-3'-phosphorothioate
  modified_base 23: mod_base = OTHER; note = 2'-O-methylguanosine
tacacaggtgaccacggctttgg

SEQ ID NO: 1516 - RNA, 23 nt, synthetic construct
  source 1..23: mol_type = other RNA
  modified_base 1: mod_base = OTHER; note = 2'-O-methyluridine-3'-phosphorothioate 5'-(E)-Vinylphosphonate
  modified_base 2: mod_base = OTHER; note = 2'-deoxy-2'-fluoroadenosine-3'-phosphorothioate
  modified_base 3: mod_base = OTHER; note = 2'-O-methyladenosine-3'-phosphate
  modified_base 4: mod_base = OTHER; note = 2'-O-methyluridine-3'-phosphate
  modified_base 5: mod_base = OTHER; note = 2'-O-methylguanosine-3'-phosphate
  modified_base 6: mod_base = OTHER; note = 2'-deoxy-2'-fluoroadenosine-3'-phosphate
  modified_base 7: mod_base = OTHER; note = 2'-O-methyluridine-3'-phosphate
  modified_base 8: mod_base = OTHER; note = 2'-deoxy-2'-fluorocytidine-3'-phosphate
  modified_base 9: mod_base = OTHER; note = 2'-deoxy-2'-fluoroadenosine-3'-phosphate
  modified_base 10: mod_base = OTHER; note = 2'-O-methylcytidine-3'-phosphate
  modified_base 11: mod_base = OTHER; note = 2'-O-methyladenosine-3'-phosphate
  modified_base 12: mod_base = OTHER; note = 2'-O-methylcytidine-3'-phosphate
  modified_base 13: mod_base = OTHER; note = 2'-O-methyladenosine-3'-phosphate
  modified_base 14: mod_base = OTHER; note = 2'-deoxy-2'-fluoroguanosine-3'-phosphate
  modified_base 15: mod_base = OTHER; note = 2'-O-methylguanosine-3'-phosphate
  modified_base 16: mod_base = OTHER; note = 2'-deoxy-2'-fluorouridine-3'-phosphate
  modified_base 17: mod_base = OTHER; note = 2'-O-methylguanosine-3'-phosphate
  modified_base 18: mod_base = OTHER; note = 2'-O-methyladenosine-3'-phosphate
  modified_base 19: mod_base = OTHER; note = 2'-O-methylcytidine-3'-phosphate
  modified_base 20: mod_base = OTHER; note = 2'-O-methylcytidine-3'-phosphate
  modified_base 21: mod_base = OTHER; note = 2'-O-methyladenosine-3'-phosphorothioate
  modified_base 22: mod_base = OTHER; note = 2'-O-methylcytidine-3'-phosphorothioate
  modified_base 23: mod_base = OTHER; note = 2'-O-methylguanosine
taatgatcacacaggtgaccacg

SEQ ID NO: 1517 - RNA, 23 nt, synthetic construct
  source 1..23: mol_type = other RNA
  modified_base 1: mod_base = OTHER; note = 2'-O-methyluridine-3'-phosphorothioate 5'-(E)-Vinylphosphonate
  modified_base 2: mod_base = OTHER; note = 2'-deoxy-2'-fluoroadenosine-3'-phosphorothioate
  modified_base 3: mod_base = OTHER; note = 2'-O-methylguanosine-3'-phosphate
  modified_base 4: mod_base = OTHER; note = 2'-O-methylcytidine-3'-phosphate
  modified_base 5: mod_base = OTHER; note = 2'-O-methyladenosine-3'-phosphate
  modified_base 6: mod_base = OTHER; note = 2'-deoxy-2'-fluorocytidine-3'-phosphate
  modified_base 7: mod_base = OTHER; note = 2'-O-methyladenosine-3'-phosphate
  modified_base 8: mod_base = OTHER; note = 2'-deoxy-2'-fluoroadenosine-3'-phosphate
  modified_base 9: mod_base = OTHER; note = 2'-deoxy-2'-fluorouridine-3'-phosphate
  modified_base 10: mod_base = OTHER; note = 2'-O-methylguanosine-3'-phosphate
  modified_base 11: mod_base = OTHER; note = 2'-O-methyladenosine-3'-phosphate
  modified_base 12: mod_base = OTHER; note = 2'-O-methyluridine-3'-phosphate
  modified_base 13: mod_base = OTHER; note = 2'-O-methylcytidine-3'-phosphate
  modified_base 14: mod_base = OTHER; note = 2'-deoxy-2'-fluoroadenosine-3'-phosphate
  modified_base 15: mod_base = OTHER; note = 2'-O-methylcytidine-3'-phosphate
  modified_base 16: mod_base = OTHER; note = 2'-deoxy-2'-fluoroadenosine-3'-phosphate
  modified_base 17: mod_base = OTHER; note = 2'-O-methylcytidine-3'-phosphate
  modified_base 18: mod_base = OTHER; note = 2'-O-methyladenosine-3'-phosphate
  modified_base 19: mod_base = OTHER; note = 2'-O-methylguanosine-3'-phosphate
  modified_base 20: mod_base = OTHER; note = 2'-O-methylguanosine-3'-phosphate
  modified_base 21: mod_base = OTHER; note = 2'-O-methyluridine-3'-phosphorothioate
  modified_base 22: mod_base = OTHER; note = 2'-O-methylguanosine-3'-phosphorothioate
  modified_base 23: mod_base = OTHER; note = 2'-O-methyladenosine
tagcacaatgatcacacaggtga

SEQ ID NO: 1518 - RNA, 23 nt, synthetic construct
  source 1..23: mol_type = other RNA
  modified_base 1: mod_base = OTHER; note = 2'-O-methyluridine-3'-phosphorothioate 5'-(E)-Vinylphosphonate
  modified_base 2: mod_base = OTHER; note = 2'-deoxy-2'-fluoroadenosine-3'-phosphorothioate
  modified_base 3: mod_base = OTHER; note = 2'-O-methylcytidine-3'-phosphate
  modified_base 4: mod_base = OTHER; note = 2'-O-methyluridine-3'-phosphate
  modified_base 5: mod_base = OTHER; note = 2'-O-methylguanosine-3'-phosphate
  modified_base 6: mod_base = OTHER; note = 2'-deoxy-2'-fluoroadenosine-3'-phosphate
  modified_base 7: mod_base = OTHER; note = 2'-O-methylcytidine-3'-phosphate
  modified_base 8: mod_base = OTHER; note = 2'-deoxy-2'-fluoroadenosine-3'-phosphate
  modified_base 9: mod_base = OTHER; note = 2'-deoxy-2'-fluoroguanosine-3'-phosphate
  modified_base 10: mod_base = OTHER; note = 2'-O-methylcytidine-3'-phosphate
  modified_base 11: mod_base = OTHER; note = 2'-O-methyladenosine-3'-phosphate
  modified_base 12: mod_base = OTHER; note = 2'-O-methylcytidine-3'-phosphate
  modified_base 13: mod_base = OTHER; note = 2'-O-methyladenosine-3'-phosphate
  modified_base 14: mod_base = OTHER; note = 2'-deoxy-2'-fluoroadenosine-3'-phosphate
  modified_base 15: mod_base = OTHER; note = 2'-O-methyluridine-3'-phosphate
  modified_base 16: mod_base = OTHER; note = 2'-deoxy-2'-fluoroguanosine-3'-phosphate
  modified_base 17: mod_base = OTHER; note = 2'-O-methyladenosine-3'-phosphate
  modified_base 18: mod_base = OTHER; note = 2'-O-methyluridine-3'-phosphate
  modified_base 19: mod_base = OTHER; note = 2'-O-methylcytidine-3'-phosphate
  modified_base 20: mod_base = OTHER; note = 2'-O-methyladenosine-3'-phosphate
  modified_base 21: mod_base = OTHER; note = 2'-O-methylcytidine-3'-phosphorothioate
  modified_base 22: mod_base = OTHER; note = 2'-O-methyladenosine-3'-phosphorothioate
  modified_base 23: mod_base = OTHER; note = 2'-O-methylcytidine
tactgacagcacaatgatcacac

SEQ ID NO: 1519 - RNA, 23 nt, synthetic construct
  source 1..23: mol_type = other RNA
  modified_base 1: mod_base = OTHER; note = 2'-O-methyluridine-3'-phosphorothioate 5'-(E)-Vinylphosphonate
  modified_base 2: mod_base = OTHER; note = 2'-deoxy-2'-fluorocytidine-3'-phosphorothioate
  modified_base 3: mod_base = OTHER; note = 2'-O-methyladenosine-3'-phosphate
  modified_base 4: mod_base = OTHER; note = 2'-O-methylcytidine-3'-phosphate
  modified_base 5: mod_base = OTHER; note = 2'-O-methyladenosine-3'-phosphate
  modified_base 6: mod_base = OTHER; note = 2'-deoxy-2'-fluorocytidine-3'-phosphate
  modified_base 7: mod_base = OTHER; note = 2'-O-methylcytidine-3'-phosphate
  modified_base 8: mod_base = OTHER; note = 2'-deoxy-2'-fluoroadenosine-3'-phosphate
  modified_base 9: mod_base = OTHER; note = 2'-deoxy-2'-fluoroguanosine-3'-phosphate
  modified_base 10: mod_base = OTHER; note = 2'-O-methylguanosine-3'-phosphate
  modified_base 11: mod_base = OTHER; note = 2'-O-methyladenosine-3'-phosphate
  modified_base 12: mod_base = OTHER; note = 2'-O-methylcytidine-3'-phosphate
  modified_base 13: mod_base = OTHER; note = 2'-O-methyluridine-3'-phosphate
  modified_base 14: mod_base = OTHER; note = 2'-deoxy-2'-fluoroguanosine-3'-phosphate
  modified_base 15: mod_base = OTHER; note = 2'-O-methyladenosine-3'-phosphate
  modified_base 16: mod_base = OTHER; note = 2'-deoxy-2'-fluorocytidine-3'-phosphate
  modified_base 17: mod_base = OTHER; note = 2'-O-methyladenosine-3'-phosphate
  modified_base 18: mod_base = OTHER; note = 2'-O-methylguanosine-3'-phosphate
  modified_base 19: mod_base = OTHER; note = 2'-O-methylcytidine-3'-phosphate
  modified_base 20: mod_base = OTHER; note = 2'-O-methyladenosine-3'-phosphate
  modified_base 21: mod_base = OTHER; note = 2'-O-methylcytidine-3'-phosphorothioate
  modified_base 22: mod_base = OTHER; note = 2'-O-methyladenosine-3'-phosphorothioate
  modified_base 23: mod_base = OTHER; note = 2'-O-methyladenosine
tcacaccaggactgacagcacaa

SEQ ID NO: 1520 - RNA, 23 nt, synthetic construct
  source 1..23: mol_type = other RNA
  modified_base 1: mod_base = OTHER; note = 2'-O-methyluridine-3'-phosphorothioate 5'-(E)-Vinylphosphonate
  modified_base 2: mod_base = OTHER; note = 2'-deoxy-2'-fluoroadenosine-3'-phosphorothioate
  modified_base 3: mod_base = OTHER; note = 2'-O-methylguanosine-3'-phosphate
  modified_base 4: mod_base = OTHER; note = 2'-O-methyladenosine-3'-phosphate
  modified_base 5: mod_base = OTHER; note = 2'-O-methylcytidine-3'-phosphate
  modified_base 6: mod_base = OTHER; note = 2'-deoxy-2'-fluoroadenosine-3'-phosphate
  modified_base 7: mod_base = OTHER; note = 2'-O-methylguanosine-3'-phosphate
  modified_base 8: mod_base = OTHER; note = 2'-deoxy-2'-fluorocytidine-3'-phosphate
  modified_base 9: mod_base = OTHER; note = 2'-deoxy-2'-fluoroadenosine-3'-phosphate
  modified_base 10: mod_base = OTHER; note = 2'-O-methylcytidine-3'-phosphate
  modified_base 11: mod_base = OTHER; note = 2'-O-methyladenosine-3'-phosphate
  modified_base 12: mod_base = OTHER; note = 2'-O-methylcytidine-3'-phosphate
  modified_base 13: mod_base = OTHER; note = 2'-O-methylcytidine-3'-phosphate
  modified_base 14: mod_base = OTHER; note = 2'-deoxy-2'-fluoroadenosine-3'-phosphate
  modified_base 15: mod_base = OTHER; note = 2'-O-methylguanosine-3'-phosphate
  modified_base 16: mod_base = OTHER; note = 2'-deoxy-2'-fluoroguanosine-3'-phosphate
  modified_base 17: mod_base = OTHER; note = 2'-O-methyladenosine-3'-phosphate
  modified_base 18: mod_base = OTHER; note = 2'-O-methylcytidine-3'-phosphate
  modified_base 19: mod_base = OTHER; note = 2'-O-methyluridine-3'-phosphate
  modified_base 20: mod_base = OTHER; note = 2'-O-methylguanosine-3'-phosphate
  modified_base 21: mod_base = OTHER; note = 2'-O-methyladenosine-3'-phosphorothioate
  modified_base 22: mod_base = OTHER; note = 2'-O-methylcytidine-3'-phosphorothioate
  modified_base 23: mod_base = OTHER; note = 2'-O-methyladenosine
tagacagcacaccaggactgaca

SEQ ID NO: 1521 - RNA, 23 nt, synthetic construct
  source 1..23: mol_type = other RNA
  modified_base 1: mod_base = OTHER; note = 2'-O-methyluridine-3'-phosphorothioate 5'-(E)-Vinylphosphonate
  modified_base 2: mod_base = OTHER; note = 2'-deoxy-2'-fluoroadenosine-3'-phosphorothioate
  modified_base 3: mod_base = OTHER; note = 2'-O-methylguanosine-3'-phosphate
  modified_base 4: mod_base = OTHER; note = 2'-O-methyluridine-3'-phosphate
  modified_base 5: mod_base = OTHER; note = 2'-O-methylguanosine-3'-phosphate
  modified_base 6: mod_base = OTHER; note = 2'-deoxy-2'-fluoroguanosine-3'-phosphate
  modified_base 7: mod_base = OTHER; note = 2'-O-methyladenosine-3'-phosphate
  modified_base 8: mod_base = OTHER; note = 2'-deoxy-2'-fluoroadenosine-3'-phosphate
  modified_base 9: mod_base = OTHER; note = 2'-deoxy-2'-fluoroguanosine-3'-phosphate
  modified_base 10: mod_base = OTHER; note = 2'-O-methyladenosine-3'-phosphate
  modified_base 11: mod_base = OTHER; note = 2'-O-methylcytidine-3'-phosphate
  modified_base 12: mod_base = OTHER; note = 2'-O-methyladenosine-3'-phosphate
  modified_base 13: mod_base = OTHER; note = 2'-O-methylguanosine-3'-phosphate
  modified_base 14: mod_base = OTHER; note = 2'-deoxy-2'-fluorocytidine-3'-phosphate
  modified_base 15: mod_base = OTHER; note = 2'-O-methyladenosine-3'-phosphate
  modified_base 16: mod_base = OTHER; note = 2'-deoxy-2'-fluorocytidine-3'-phosphate
  modified_base 17: mod_base = OTHER; note = 2'-O-methyladenosine-3'-phosphate
  modified_base 18: mod_base = OTHER; note = 2'-O-methylcytidine-3'-phosphate
  modified_base 19: mod_base = OTHER; note = 2'-O-methylcytidine-3'-phosphate
  modified_base 20: mod_base = OTHER; note = 2'-O-methyladenosine-3'-phosphate
  modified_base 21: mod_base = OTHER; note = 2'-O-methylguanosine-3'-phosphorothioate
  modified_base 22: mod_base = OTHER; note = 2'-O-methylguanosine-3'-phosphorothioate
  modified_base 23: mod_base = OTHER; note = 2'-O-methyladenosine
tagtggaagacagcacaccagga

SEQ ID NO: 1522 - RNA, 23 nt, synthetic construct
  source 1..23: mol_type = other RNA
  modified_base 1: mod_base = OTHER; note = 2'-O-methyluridine-3'-phosphorothioate 5'-(E)-Vinylphosphonate
  modified_base 2: mod_base = OTHER; note = 2'-deoxy-2'-fluoroadenosine-3'-phosphorothioate
  modified_base 3: mod_base = OTHER; note = 2'-O-methyladenosine-3'-phosphate
  modified_base 4: mod_base = OTHER; note = 2'-O-methylcytidine-3'-phosphate
  modified_base 5: mod_base = OTHER; note = 2'-O-methylcytidine-3'-phosphate
  modified_base 6: mod_base = OTHER; note = 2'-deoxy-2'-fluoroadenosine-3'-phosphate
  modified_base 7: mod_base = OTHER; note = 2'-O-methylcytidine-3'-phosphate
  modified_base 8: mod_base = OTHER; note = 2'-deoxy-2'-fluorocytidine-3'-phosphate
  modified_base 9: mod_base = OTHER; note = 2'-deoxy-2'-fluorouridine-3'-phosphate
  modified_base 10: mod_base = OTHER; note = 2'-O-methylguanosine-3'-phosphate
  modified_base 11: mod_base = OTHER; note = 2'-O-methyluridine-3'-phosphate
  modified_base 12: mod_base = OTHER; note = 2'-O-methyladenosine-3'-phosphate
  modified_base 13: mod_base = OTHER; note = 2'-O-methylcytidine-3'-phosphate
  modified_base 14: mod_base = OTHER; note = 2'-deoxy-2'-fluorocytidine-3'-phosphate
  modified_base 15: mod_base = OTHER; note = 2'-O-methyladenosine-3'-phosphate
  modified_base 16: mod_base = OTHER; note = 2'-deoxy-2'-fluoroadenosine-3'-phosphate
  modified_base 17: mod_base = OTHER; note = 2'-O-methylguanosine-3'-phosphate
  modified_base 18: mod_base = OTHER; note = 2'-O-methylguanosine-3'-phosphate
  modified_base 19: mod_base = OTHER; note = 2'-O-methyladenosine-3'-phosphate
  modified_base 20: mod_base = OTHER; note = 2'-O-methyladenosine-3'-phosphate
  modified_base 21: mod_base = OTHER; note = 2'-O-methyladenosine-3'-phosphorothioate
  modified_base 22: mod_base = OTHER; note = 2'-O-methyluridine-3'-phosphorothioate
  modified_base 23: mod_base = OTHER; note = 2'-O-methylcytidine
taaccacctgtaccaaggaaatc

SEQ ID NO: 1523 - RNA, 23 nt, synthetic construct
  source 1..23: mol_type = other RNA
  modified_base 1: mod_base = OTHER; note = 2'-O-methyluridine-3'-phosphorothioate 5'-(E)-Vinylphosphonate
  modified_base 2: mod_base = OTHER; note = 2'-deoxy-2'-fluoroguanosine-3'-phosphorothioate
  modified_base 3: mod_base = OTHER; note = 2'-O-methyladenosine-3'-phosphate
  modified_base 4: mod_base = OTHER; note = 2'-O-methylguanosine-3'-phosphate
  modified_base 5: mod_base = OTHER; note = 2'-O-methyladenosine-3'-phosphate
  modified_base 6: mod_base = OTHER; note = 2'-deoxy-2'-fluoroguanosine-3'-phosphate
  modified_base 7: mod_base = OTHER; note = 2'-O-methyladenosine-3'-phosphate
  modified_base 8: mod_base = OTHER; note = 2'-deoxy-2'-fluoroadenosine-3'-phosphate
  modified_base 9: mod_base = OTHER; note = 2'-deoxy-2'-fluorocytidine-3'-phosphate
  modified_base 10: mod_base = OTHER; note = 2'-O-methylcytidine-3'-phosphate
  modified_base 11: mod_base = OTHER; note = 2'-O-methyladenosine-3'-phosphate
  modified_base 12: mod_base = OTHER; note = 2'-O-methylcytidine-3'-phosphate
  modified_base 13: mod_base = OTHER; note = 2'-O-methylcytidine-3'-phosphate
  modified_base 14: mod_base = OTHER; note = 2'-deoxy-2'-fluorouridine-3'-phosphate
  modified_base 15: mod_base = OTHER; note = 2'-O-methylguanosine-3'-phosphate
  modified_base 16: mod_base = OTHER; note = 2'-deoxy-2'-fluorouridine-3'-phosphate
  modified_base 17: mod_base = OTHER; note = 2'-O-methyladenosine-3'-phosphate
  modified_base 18: mod_base = OTHER; note = 2'-O-methylcytidine-3'-phosphate
  modified_base 19: mod_base = OTHER; note = 2'-O-methylcytidine-3'-phosphate
  modified_base 20: mod_base = OTHER; note = 2'-O-methyladenosine-3'-phosphate
  modified_base 21: mod_base = OTHER; note = 2'-O-methyladenosine-3'-phosphorothioate
  modified_base 22: mod_base = OTHER; note = 2'-O-methylguanosine-3'-phosphorothioate
  modified_base 23: mod_base = OTHER; note = 2'-O-methylguanosine
tgagagaaccacctgtaccaagg

SEQ ID NO: 1524 - RNA, 23 nt, synthetic construct
  source 1..23: mol_type = other RNA
  modified_base 1: mod_base = OTHER; note = 2'-O-methyluridine-3'-phosphorothioate 5'-(E)-Vinylphosphonate
  modified_base 2: mod_base = OTHER; note = 2'-deoxy-2'-fluorocytidine-3'-phosphorothioate
  modified_base 3: mod_base = OTHER; note = 2'-O-methylcytidine-3'-phosphate
  modified_base 4: mod_base = OTHER; note = 2'-O-methyladenosine-3'-phosphate
  modified_base 5: mod_base = OTHER; note = 2'-O-methyluridine-3'-phosphate
  modified_base 6: mod_base = OTHER; note = 2'-deoxy-2'-fluorouridine-3'-phosphate
  modified_base 7: mod_base = OTHER; note = 2'-O-methylguanosine-3'-phosphate
  modified_base 8: mod_base = OTHER; note = 2'-deoxy-2'-fluorocytidine-3'-phosphate
  modified_base 9: mod_base = OTHER; note = 2'-deoxy-2'-fluorouridine-3'-phosphate
  modified_base 10: mod_base = OTHER; note = 2'-O-methylguanosine-3'-phosphate
  modified_base 11: mod_base = OTHER; note = 2'-O-methylguanosine-3'-phosphate
  modified_base 12: mod_base = OTHER; note = 2'-O-methyladenosine-3'-phosphate
  modified_base 13: mod_base = OTHER; note = 2'-O-methylguanosine-3'-phosphate
  modified_base 14: mod_base = OTHER; note = 2'-deoxy-2'-fluoroadenosine-3'-phosphate
  modified_base 15: mod_base = OTHER; note = 2'-O-methylguanosine-3'-phosphate
  modified_base 16: mod_base = OTHER; note = 2'-deoxy-2'-fluoroadenosine-3'-phosphate
  modified_base 17: mod_base = OTHER; note = 2'-O-methyladenosine-3'-phosphate
  modified_base 18: mod_base = OTHER; note = 2'-O-methylcytidine-3'-phosphate
  modified_base 19: mod_base = OTHER; note = 2'-O-methylcytidine-3'-phosphate
  modified_base 20: mod_base = OTHER; note = 2'-O-methyladenosine-3'-phosphate
  modified_base 21: mod_base = OTHER; note = 2'-O-methylcytidine-3'-phosphorothioate
  modified_base 22: mod_base = OTHER; note = 2'-O-methylcytidine-3'-phosphorothioate
  modified_base 23: mod_base = OTHER; note = 2'-O-methyluridine
tccattgctggagagaaccacct

SEQ ID NO: 1525 - RNA, 23 nt, synthetic construct
  source 1..23: mol_type = other RNA
  modified_base 1: mod_base = OTHER; note = 2'-O-methyluridine-3'-phosphorothioate 5'-(E)-Vinylphosphonate
  modified_base 2: mod_base = OTHER; note = 2'-deoxy-2'-fluoroguanosine-3'-phosphorothioate
  modified_base 3: mod_base = OTHER; note = 2'-O-methyladenosine-3'-phosphate
  modified_base 4: mod_base = OTHER; note = 2'-O-methyladenosine-3'-phosphate
  modified_base 5: mod_base = OTHER; note = 2'-O-methylguanosine-3'-phosphate
  modified_base 6: mod_base = OTHER; note = 2'-deoxy-2'-fluorocytidine-3'-phosphate
  modified_base 7: mod_base = OTHER; note = 2'-O-methyluridine-3'-phosphate
  modified_base 8: mod_base = OTHER; note = 2'-deoxy-2'-fluorocytidine-3'-phosphate
  modified_base 9: mod_base = OTHER; note = 2'-deoxy-2'-fluorocytidine-3'-phosphate
  modified_base 10: mod_base = OTHER; note = 2'-O-methylcytidine-3'-phosphate
  modified_base 11: mod_base = OTHER; note = 2'-O-methyladenosine-3'-phosphate
  modified_base 12: mod_base = OTHER; note = 2'-O-methyluridine-3'-phosphate
  modified_base 13: mod_base = OTHER; note = 2'-O-methyluridine-3'-phosphate
  modified_base 14: mod_base = OTHER; note = 2'-deoxy-2'-fluoroguanosine-3'-phosphate
  modified_base 15: mod_base = OTHER; note = 2'-O-methylcytidine-3'-phosphate
  modified_base 16: mod_base = OTHER; note = 2'-deoxy-2'-fluorouridine-3'-phosphate
  modified_base 17: mod_base = OTHER; note = 2'-O-methylguanosine-3'-phosphate
  modified_base 18: mod_base = OTHER; note = 2'-O-methylguanosine-3'-phosphate
  modified_base 19: mod_base = OTHER; note = 2'-O-methyladenosine-3'-phosphate
  modified_base 20: mod_base = OTHER; note = 2'-O-methylguanosine-3'-phosphate
  modified_base 21: mod_base = OTHER; note = 2'-O-methyladenosine-3'-phosphorothioate
  modified_base 22: mod_base = OTHER; note = 2'-O-methylguanosine-3'-phosphorothioate
  modified_base 23: mod_base = OTHER; note = 2'-O-methyladenosine
tgaagctcccattgctggagaga

SEQ ID NO: 1526 - RNA, 23 nt, synthetic construct
  source 1..23: mol_type = other RNA
  modified_base 1: mod_base = OTHER; note = 2'-O-methyluridine-3'-phosphorothioate 5'-(E)-Vinylphosphonate
  modified_base 2: mod_base = OTHER; note = 2'-deoxy-2'-fluorouridine-3'-phosphorothioate
  modified_base 3: mod_base = OTHER; note = 2'-O-methyladenosine-3'-phosphate
  modified_base 4: mod_base = OTHER; note = 2'-O-methyladenosine-3'-phosphate
  modified_base 5: mod_base = OTHER; note = 2'-O-methyladenosine-3'-phosphate
  modified_base 6: mod_base = OTHER; note = 2'-deoxy-2'-fluoroguanosine-3'-phosphate
  modified_base 7: mod_base = OTHER; note = 2'-O-methyladenosine-3'-phosphate
  modified_base 8: mod_base = OTHER; note = 2'-deoxy-2'-fluoroadenosine-3'-phosphate
  modified_base 9: mod_base = OTHER; note = 2'-deoxy-2'-fluorouridine-3'-phosphate
  modified_base 10: mod_base = OTHER; note = 2'-O-methylguanosine-3'-phosphate
  modified_base 11: mod_base = OTHER; note = 2'-O-methyladenosine-3'-phosphate
  modified_base 12: mod_base = OTHER; note = 2'-O-methyladenosine-3'-phosphate
  modified_base 13: mod_base = OTHER; note = 2'-O-methylguanosine-3'-phosphate
  modified_base 14: mod_base = OTHER; note = 2'-deoxy-2'-fluorocytidine-3'-phosphate
  modified_base 15: mod_base = OTHER; note = 2'-O-methyluridine-3'-phosphate
  modified_base 16: mod_base = OTHER; note = 2'-deoxy-2'-fluorocytidine-3'-phosphate
  modified_base 17: mod_base = OTHER; note = 2'-O-methylcytidine-3'-phosphate
  modified_base 18: mod_base = OTHER; note = 2'-O-methylcytidine-3'-phosphate
  modified_base 19: mod_base = OTHER; note = 2'-O-methyladenosine-3'-phosphate
  modified_base 20: mod_base = OTHER; note = 2'-O-methyluridine-3'-phosphate
  modified_base 21: mod_base = OTHER; note = 2'-O-methyluridine-3'-phosphorothioate
  modified_base 22: mod_base = OTHER; note = 2'-O-methylguanosine-3'-phosphorothioate
  modified_base 23: mod_base = OTHER; note = 2'-O-methylcytidine
ttaaagaatgaagctcccattgc

SEQ ID NO: 1527 - RNA, 23 nt, synthetic construct
  source 1..23: mol_type = other RNA
  modified_base 1: mod_base = OTHER; note = 2'-O-methyluridine-3'-phosphorothioate 5'-(E)-Vinylphosphonate
  modified_base 2: mod_base = OTHER; note = 2'-deoxy-2'-fluorouridine-3'-phosphorothioate
  modified_base 3: mod_base = OTHER; note = 2'-O-methylcytidine-3'-phosphate
  modified_base 4: mod_base = OTHER; note = 2'-O-methyladenosine-3'-phosphate
  modified_base 5: mod_base = OTHER; note = 2'-O-methyladenosine-3'-phosphate
  modified_base 6: mod_base = OTHER; note = 2'-deoxy-2'-fluoroadenosine-3'-phosphate
  modified_base 7: mod_base = OTHER; note = 2'-O-methylcytidine-3'-phosphate
  modified_base 8: mod_base = OTHER; note = 2'-deoxy-2'-fluorouridine-3'-phosphate
  modified_base 9: mod_base = OTHER; note = 2'-deoxy-2'-fluoroguanosine-3'-phosphate
  modified_base 10: mod_base = OTHER; note = 2'-O-methylguanosine-3'-phosphate
  modified_base 11: mod_base = OTHER; note = 2'-O-methyluridine-3'-phosphate
  modified_base 12: mod_base = OTHER; note = 2'-O-methyladenosine-3'-phosphate
  modified_base 13: mod_base = OTHER; note = 2'-O-methyladenosine-3'-phosphate
  modified_base 14: mod_base = OTHER; note = 2'-deoxy-2'-fluoroadenosine-3'-phosphate
  modified_base 15: mod_base = OTHER; note = 2'-O-methylguanosine-3'-phosphate
  modified_base 16: mod_base = OTHER; note = 2'-deoxy-2'-fluoroadenosine-3'-phosphate
  modified_base 17: mod_base = OTHER; note = 2'-O-methyladenosine-3'-phosphate
  modified_base 18: mod_base = OTHER; note = 2'-O-methyluridine-3'-phosphate
  modified_base 19: mod_base = OTHER; note = 2'-O-methylguanosine-3'-phosphate
  modified_base 20: mod_base = OTHER; note = 2'-O-methyladenosine-3'-phosphate
  modified_base 21: mod_base = OTHER; note = 2'-O-methyladenosine-3'-phosphorothioate
  modified_base 22: mod_base = OTHER; note = 2'-O-methylguanosine-3'-phosphorothioate
  modified_base 23: mod_base = OTHER; note = 2'-O-methylcytidine
ttcaaactggtaaagaatgaagc

SEQ ID NO: 1528 - RNA, 23 nt, synthetic construct
  source 1..23: mol_type = other RNA
  modified_base 1: mod_base = OTHER; note = 2'-O-methyluridine-3'-phosphorothioate 5'-(E)-Vinylphosphonate
  modified_base 2: mod_base = OTHER; note = 2'-deoxy-2'-fluoroadenosine-3'-phosphorothioate
  modified_base 3: mod_base = OTHER; note = 2'-O-methyladenosine-3'-phosphate
  modified_base 4: mod_base = OTHER; note = 2'-O-methylcytidine-3'-phosphate
  modified_base 5: mod_base = OTHER; note = 2'-O-methyladenosine-3'-phosphate
  modified_base 6: mod_base = OTHER; note = 2'-deoxy-2'-fluoroadenosine-3'-phosphate
  modified_base 7: mod_base = OTHER; note = 2'-O-methyluridine-3'-phosphate
  modified_base 8: mod_base = OTHER; note = 2'-deoxy-2'-fluorouridine-3'-phosphate
  modified_base 9: mod_base = OTHER; note = 2'-deoxy-2'-fluorocytidine-3'-phosphate
  modified_base 10: mod_base = OTHER; note = 2'-O-methyladenosine-3'-phosphate
  modified_base 11: mod_base = OTHER; note = 2'-O-methyladenosine-3'-phosphate
  modified_base 12: mod_base = OTHER; note = 2'-O-methyladenosine-3'-phosphate
  modified_base 13: mod_base = OTHER; note = 2'-O-methylcytidine-3'-phosphate
  modified_base 14: mod_base = OTHER; note = 2'-deoxy-2'-fluorouridine-3'-phosphate
  modified_base 15: mod_base = OTHER; note = 2'-O-methylguanosine-3'-phosphate
  modified_base 16: mod_base = OTHER; note = 2'-deoxy-2'-fluoroguanosine-3'-phosphate
  modified_base 17: mod_base = OTHER; note = 2'-O-methyluridine-3'-phosphate
  modified_base 18: mod_base = OTHER; note = 2'-O-methyladenosine-3'-phosphate
  modified_base 19: mod_base = OTHER; note = 2'-O-methyladenosine-3'-phosphate
  modified_base 20: mod_base = OTHER; note = 2'-O-methyladenosine-3'-phosphate
  modified_base 21: mod_base = OTHER; note = 2'-O-methylguanosine-3'-phosphorothioate
  modified_base 22: mod_base = OTHER; note = 2'-O-methyladenosine-3'-phosphorothioate
  modified_base 23: mod_base = OTHER; note = 2'-O-methyladenosine
taacaattcaaactggtaaagaa

SEQ ID NO: 1529 - RNA, 23 nt, synthetic construct
  source 1..23: mol_type = other RNA
  modified_base 1: mod_base = OTHER; note = 2'-O-methyluridine-3'-phosphorothioate 5'-(E)-Vinylphosphonate
  modified_base 2: mod_base = OTHER; note = 2'-deoxy-2'-fluoroadenosine-3'-phosphorothioate
  modified_base 3: mod_base = OTHER; note = 2'-O-methyladenosine-3'-phosphate
  modified_base 4: mod_base = OTHER; note = 2'-O-methyluridine-3'-phosphate
  modified_base 5: mod_base = OTHER; note = 2'-O-methylcytidine-3'-phosphate
  modified_base 6: mod_base = OTHER; note = 2'-deoxy-2'-fluorocytidine-3'-phosphate
  modified_base 7: mod_base = OTHER; note = 2'-O-methyladenosine-3'-phosphate
  modified_base 8: mod_base = OTHER; note = 2'-deoxy-2'-fluoroadenosine-3'-phosphate
  modified_base 9: mod_base = OTHER; note = 2'-deoxy-2'-fluoroadenosine-3'-phosphate
  modified_base 10: mod_base = OTHER; note = 2'-O-methylcytidine-3'-phosphate
  modified_base 11: mod_base = OTHER; note = 2'-O-methyladenosine-3'-phosphate
  modified_base 12: mod_base = OTHER; note = 2'-O-methyladenosine-3'-phosphate
  modified_base 13: mod_base = OTHER; note = 2'-O-methyluridine-3'-phosphate
  modified_base 14: mod_base = OTHER; note = 2'-deoxy-2'-fluorouridine-3'-phosphate
  modified_base 15: mod_base = OTHER; note = 2'-O-methylcytidine-3'-phosphate
  modified_base 16: mod_base = OTHER; note = 2'-deoxy-2'-fluoroadenosine-3'-phosphate
  modified_base 17: mod_base = OTHER; note = 2'-O-methyladenosine-3'-phosphate
  modified_base 18: mod_base = OTHER; note = 2'-O-methyladenosine-3'-phosphate
  modified_base 19: mod_base = OTHER; note = 2'-O-methylcytidine-3'-phosphate
  modified_base 20: mod_base = OTHER; note = 2'-O-methyluridine-3'-phosphate
  modified_base 21: mod_base = OTHER; note = 2'-O-methylguanosine-3'-phosphorothioate
  modified_base 22: mod_base = OTHER; note = 2'-O-methylguanosine-3'-phosphorothioate
  modified_base 23: mod_base = OTHER; note = 2'-O-methyluridine
taatccaaacaattcaaactggt

SEQ ID NO: 1530 - RNA, 23 nt, synthetic construct
  source 1..23: mol_type = other RNA
  modified_base 1: mod_base = OTHER; note = 2'-O-methyluridine-3'-phosphorothioate 5'-(E)-Vinylphosphonate
  modified_base 2: mod_base = OTHER; note = 2'-deoxy-2'-fluoroadenosine-3'-phosphorothioate
  modified_base 3: mod_base = OTHER; note = 2'-O-methyladenosine-3'-phosphate
  modified_base 4: mod_base = OTHER; note = 2'-O-methylguanosine-3'-phosphate
  modified_base 5: mod_base = OTHER; note = 2'-O-methyladenosine-3'-phosphate
  modified_base 6: mod_base = OTHER; note = 2'-deoxy-2'-fluoroguanosine-3'-phosphate
  modified_base 7: mod_base = OTHER; note = 2'-O-methyluridine-3'-phosphate
  modified_base 8: mod_base = OTHER; note = 2'-deoxy-2'-fluoroadenosine-3'-phosphate
  modified_base 9: mod_base = OTHER; note = 2'-deoxy-2'-fluoroadenosine-3'-phosphate
  modified_base 10: mod_base = OTHER; note = 2'-O-methyladenosine-3'-phosphate
  modified_base 11: mod_base = OTHER; note = 2'-O-methyluridine-3'-phosphate
  modified_base 12: mod_base = OTHER; note = 2'-O-methylcytidine-3'-phosphate
  modified_base 13: mod_base = OTHER; note = 2'-O-methylcytidine-3'-phosphate
  modified_base 14: mod_base = OTHER; note = 2'-deoxy-2'-fluoroadenosine-3'-phosphate
  modified_base 15: mod_base = OTHER; note = 2'-O-methyladenosine-3'-phosphate
  modified_base 16: mod_base = OTHER; note = 2'-deoxy-2'-fluoroadenosine-3'-phosphate
  modified_base 17: mod_base = OTHER; note = 2'-O-methylcytidine-3'-phosphate
  modified_base 18: mod_base = OTHER; note = 2'-O-methyladenosine-3'-phosphate
  modified_base 19: mod_base = OTHER; note = 2'-O-methyladenosine-3'-phosphate
  modified_base 20: mod_base = OTHER; note = 2'-O-methyluridine-3'-phosphate
  modified_base 21: mod_base = OTHER; note = 2'-O-methyluridine-3'-phosphorothioate
  modified_base 22: mod_base = OTHER; note = 2'-O-methylcytidine-3'-phosphorothioate
  modified_base 23: mod_base = OTHER; note = 2'-O-methyladenosine
taagagtaaatccaaacaattca

SEQ ID NO: 1531 - RNA, 23 nt, synthetic construct
  source 1..23: mol_type = other RNA
  modified_base 1: mod_base = OTHER; note = 2'-O-methyluridine-3'-phosphorothioate 5'-(E)-Vinylphosphonate
  modified_base 2: mod_base = OTHER; note = 2'-deoxy-2'-fluorocytidine-3'-phosphorothioate
  modified_base 3: mod_base = OTHER; note = 2'-O-methyluridine-3'-phosphate
  modified_base 4: mod_base = OTHER; note = 2'-O-methylguanosine-3'-phosphate
  modified_base 5: mod_base = OTHER; note = 2'-O-methyladenosine-3'-phosphate
  modified_base 6: mod_base = OTHER; note = 2'-deoxy-2'-fluorocytidine-3'-phosphate
  modified_base 7: mod_base = OTHER; note = 2'-O-methyluridine-3'-phosphate
  modified_base 8: mod_base = OTHER; note = 2'-deoxy-2'-fluorouridine-3'-phosphate
  modified_base 9: mod_base = OTHER; note = 2'-deoxy-2'-fluoroguanosine-3'-phosphate
  modified_base 10: mod_base = OTHER; note = 2'-O-methyladenosine-3'-phosphate
  modified_base 11: mod_base = OTHER; note = 2'-O-methyladenosine-3'-phosphate
  modified_base 12: mod_base = OTHER; note = 2'-O-methyladenosine-3'-phosphate
  modified_base 13: mod_base = OTHER; note = 2'-O-methyladenosine-3'-phosphate
  modified_base 14: mod_base = OTHER; note = 2'-deoxy-2'-fluoroadenosine-3'-phosphate
  modified_base 15: mod_base = OTHER; note = 2'-O-methyluridine-3'-phosphate
  modified_base 16: mod_base = OTHER; note = 2'-deoxy-2'-fluoroadenosine-3'-phosphate
  modified_base 17: mod_base = OTHER; note = 2'-O-methyluridine-3'-phosphate
  modified_base 18: mod_base = OTHER; note = 2'-O-methyladenosine-3'-phosphate
  modified_base 19: mod_base = OTHER; note = 2'-O-methyladenosine-3'-phosphate
  modified_base 20: mod_base = OTHER; note = 2'-O-methylguanosine-3'-phosphate
  modified_base 21: mod_base = OTHER; note = 2'-O-methyladenosine-3'-phosphorothioate
  modified_base 22: mod_base = OTHER; note = 2'-O-methylguanosine-3'-phosphorothioate
  modified_base 23: mod_base = OTHER; note = 2'-O-methyluridine
tctgacttgaaaaatataagagt

SEQ ID NO: 1532 - RNA, 23 nt, synthetic construct
  source 1..23: mol_type = other RNA
  modified_base 1: mod_base = OTHER; note = 2'-O-methyluridine-3'-phosphorothioate 5'-(E)-Vinylphosphonate
  modified_base 2: mod_base = OTHER; note = 2'-deoxy-2'-fluoroguanosine-3'-phosphorothioate
  modified_base 3: mod_base = OTHER; note = 2'-O-methylguanosine-3'-phosphate
  modified_base 4: mod_base = OTHER; note = 2'-O-methyluridine-3'-phosphate
  modified_base 5: mod_base = OTHER; note = 2'-O-methyluridine-3'-phosphate
  modified_base 6: mod_base = OTHER; note = 2'-deoxy-2'-fluorouridine-3'-phosphate
  modified_base 7: mod_base = OTHER; note = 2'-O-methyladenosine-3'-phosphate
  modified_base 8: mod_base = OTHER; note = 2'-deoxy-2'-fluoroadenosine-3'-phosphate
  modified_base 9: mod_base = OTHER; note = 2'-deoxy-2'-fluorouridine-3'-phosphate
  modified_base 10: mod_base = OTHER; note = 2'-O-methylcytidine-3'-phosphate
  modified_base 11: mod_base = OTHER; note = 2'-O-methylcytidine-3'-phosphate
  modified_base 12: mod_base = OTHER; note = 2'-O-methyluridine-3'-phosphate
  modified_base 13: mod_base = OTHER; note = 2'-O-methylguanosine-3'-phosphate
  modified_base 14: mod_base = OTHER; note = 2'-deoxy-2'-fluoroadenosine-3'-phosphate
  modified_base 15: mod_base = OTHER; note = 2'-O-methylcytidine-3'-phosphate
  modified_base 16: mod_base = OTHER; note = 2'-deoxy-2'-fluorouridine-3'-phosphate
  modified_base 17: mod_base = OTHER; note = 2'-O-methyluridine-3'-phosphate
  modified_base 18: mod_base = OTHER; note = 2'-O-methylguanosine-3'-phosphate
  modified_base 19: mod_base = OTHER; note = 2'-O-methyladenosine-3'-phosphate
  modified_base 20: mod_base = OTHER; note = 2'-O-methyladenosine-3'-phosphate
  modified_base 21: mod_base = OTHER; note = 2'-O-methyladenosine-3'-phosphorothioate
  modified_base 22: mod_base = OTHER; note = 2'-O-methyladenosine-3'-phosphorothioate
  modified_base 23: mod_base = OTHER; note = 2'-O-methyladenosine
tggtttaatcctgacttgaaaaa

SEQ ID NO: 1533 - RNA, 23 nt, synthetic construct
  source 1..23: mol_type = other RNA
  modified_base 1: mod_base = OTHER; note = 2'-O-methyluridine-3'-phosphorothioate 5'-(E)-Vinylphosphonate
  modified_base 2: mod_base = OTHER; note = 2'-deoxy-2'-fluorouridine-3'-phosphorothioate
  modified_base 3: mod_base = OTHER; note = 2'-O-methyladenosine-3'-phosphate
  modified_base 4: mod_base = OTHER; note = 2'-O-methyladenosine-3'-phosphate
  modified_base 5: mod_base = OTHER; note = 2'-O-methyladenosine-3'-phosphate
  modified_base 6: mod_base = OTHER; note = 2'-deoxy-2'-fluoroadenosine-3'-phosphate
  modified_base 7: mod_base = OTHER; note = 2'-O-methylguanosine-3'-phosphate
  modified_base 8: mod_base = OTHER; note = 2'-deoxy-2'-fluoroguanosine-3'-phosphate
  modified_base 9: mod_base = OTHER; note = 2'-deoxy-2'-fluoroguanosine-3'-phosphate
  modified_base 10: mod_base = OTHER; note = 2'-O-methyluridine-3'-phosphate
  modified_base 11: mod_base = OTHER; note = 2'-O-methyluridine-3'-phosphate
  modified_base 12: mod_base = OTHER; note = 2'-O-methyluridine-3'-phosphate
  modified_base 13: mod_base = OTHER; note = 2'-O-methyladenosine-3'-phosphate
  modified_base 14: mod_base = OTHER; note = 2'-deoxy-2'-fluoroadenosine-3'-phosphate
  modified_base 15: mod_base = OTHER; note = 2'-O-methyluridine-3'-phosphate
  modified_base 16: mod_base = OTHER; note = 2'-deoxy-2'-fluorocytidine-3'-phosphate
  modified_base 17: mod_base = OTHER; note = 2'-O-methylcytidine-3'-phosphate
  modified_base 18: mod_base = OTHER; note = 2'-O-methyluridine-3'-phosphate
  modified_base 19: mod_base = OTHER; note = 2'-O-methylguanosine-3'-phosphate
  modified_base 20: mod_base = OTHER; note = 2'-O-methyladenosine-3'-phosphate
  modified_base 21: mod_base = OTHER; note = 2'-O-methylcytidine-3'-phosphorothioate
  modified_base 22: mod_base = OTHER; note = 2'-O-methyluridine-3'-phosphorothioate
  modified_base 23: mod_base = OTHER; note = 2'-O-methyluridine
ttaaaagggtttaatcctgactt

SEQ ID NO: 1534 - RNA, 23 nt, synthetic construct
  source 1..23: mol_type = other RNA
  modified_base 1: mod_base = OTHER; note = 2'-O-methyluridine-3'-phosphorothioate 5'-(E)-Vinylphosphonate
  modified_base 2: mod_base = OTHER; note = 2'-deoxy-2'-fluorocytidine-3'-phosphorothioate
  modified_base 3: mod_base = OTHER; note = 2'-O-methylguanosine-3'-phosphate
  modified_base 4: mod_base = OTHER; note = 2'-O-methyladenosine-3'-phosphate
  modified_base 5: mod_base = OTHER; note = 2'-O-methylguanosine-3'-phosphate
  modified_base 6: mod_base = OTHER; note = 2'-deoxy-2'-fluoroadenosine-3'-phosphate
  modified_base 7: mod_base = OTHER; note = 2'-O-methyladenosine-3'-phosphate
  modified_base 8: mod_base = OTHER; note = 2'-deoxy-2'-fluorouridine-3'-phosphate
  modified_base 9: mod_base = OTHER; note = 2'-deoxy-2'-fluoroadenosine-3'-phosphate
  modified_base 10: mod_base = OTHER; note = 2'-O-methyluridine-3'-phosphate
  modified_base 11: mod_base = OTHER; note = 2'-O-methyladenosine-3'-phosphate
  modified_base 12: mod_base = OTHER; note = 2'-O-methyluridine-3'-phosphate
  modified_base 13: mod_base = OTHER; note = 2'-O-methyladenosine-3'-phosphate
  modified_base 14: mod_base = OTHER; note = 2'-deoxy-2'-fluoroadenosine-3'-phosphate
  modified_base 15: mod_base = OTHER; note = 2'-O-methyladenosine-3'-phosphate
  modified_base 16: mod_base = OTHER; note = 2'-deoxy-2'-fluoroadenosine-3'-phosphate
  modified_base 17: mod_base = OTHER; note = 2'-O-methylguanosine-3'-phosphate
  modified_base 18: mod_base = OTHER; note = 2'-O-methylguanosine-3'-phosphate
  modified_base 19: mod_base = OTHER; note = 2'-O-methylguanosine-3'-phosphate
  modified_base 20: mod_base = OTHER; note = 2'-O-methyluridine-3'-phosphate
  modified_base 21: mod_base = OTHER; note = 2'-O-methyluridine-3'-phosphorothioate
  modified_base 22: mod_base = OTHER; note = 2'-O-methyluridine-3'-phosphorothioate
  modified_base 23: mod_base = OTHER; note = 2'-O-methyladenosine
tcgagaatatataaaagggttta

SEQ ID NO: 1535 - RNA, 23 nt, synthetic construct
  source 1..23: mol_type = other RNA
  modified_base 1: mod_base = OTHER; note = 2'-O-methyluridine-3'-phosphorothioate 5'-(E)-Vinylphosphonate
  modified_base 2: mod_base = OTHER; note = 2'-deoxy-2'-fluorouridine-3'-phosphorothioate
  modified_base 3: mod_base = OTHER; note = 2'-O-methylguanosine-3'-phosphate
  modified_base 4: mod_base = OTHER; note = 2'-O-methyluridine-3'-phosphate
  modified_base 5: mod_base = OTHER; note = 2'-O-methyluridine-3'-phosphate
  modified_base 6: mod_base = OTHER; note = 2'-deoxy-2'-fluorocytidine-3'-phosphate
  modified_base 7: mod_base = OTHER; note = 2'-O-methylcytidine-3'-phosphate
  modified_base 8: mod_base = OTHER; note = 2'-deoxy-2'-fluoroguanosine-3'-phosphate
  modified_base 9: mod_base = OTHER; note = 2'-deoxy-2'-fluoroadenosine-3'-phosphate
  modified_base 10: mod_base = OTHER; note = 2'-O-methylguanosine-3'-phosphate
  modified_base 11: mod_base = OTHER; note = 2'-O-methyladenosine-3'-phosphate
  modified_base 12: mod_base = OTHER; note = 2'-O-methyladenosine-3'-phosphate
  modified_base 13: mod_base = OTHER; note = 2'-O-methyluridine-3'-phosphate
  modified_base 14: mod_base = OTHER; note = 2'-deoxy-2'-fluoroadenosine-3'-phosphate
  modified_base 15: mod_base = OTHER; note = 2'-O-methyluridine-3'-phosphate
  modified_base 16: mod_base = OTHER; note = 2'-deoxy-2'-fluoroadenosine-3'-phosphate
  modified_base 17: mod_base = OTHER; note = 2'-O-methyluridine-3'-phosphate
  modified_base 18: mod_base = OTHER; note = 2'-O-methyladenosine-3'-phosphate
  modified_base 19: mod_base = OTHER; note = 2'-O-methyladenosine-3'-phosphate
  modified_base 20: mod_base = OTHER; note = 2'-O-methyladenosine-3'-phosphate
  modified_base 21: mod_base = OTHER; note = 2'-O-methyladenosine-3'-phosphorothioate
  modified_base 22: mod_base = OTHER; note = 2'-O-methylguanosine-3'-phosphorothioate
  modified_base 23: mod_base = OTHER; note = 2'-O-methylguanosine
ttgttccgagaatatataaaagg

SEQ ID NO: 1536 - RNA, 23 nt, synthetic construct
  source 1..23: mol_type = other RNA
  modified_base 1: mod_base = OTHER; note = 2'-O-methyluridine-3'-phosphorothioate 5'-(E)-Vinylphosphonate
  modified_base 2: mod_base = OTHER; note = 2'-deoxy-2'-fluorouridine-3'-phosphorothioate
  modified_base 3: mod_base = OTHER; note = 2'-O-methylguanosine-3'-phosphate
  modified_base 4: mod_base = OTHER; note = 2'-O-methylcytidine-3'-phosphate
  modified_base 5: mod_base = OTHER; note = 2'-O-methyladenosine-3'-phosphate
  modified_base 6: mod_base = OTHER; note = 2'-deoxy-2'-fluorocytidine-3'-phosphate
  modified_base 7: mod_base = OTHER; note = 2'-O-methyluridine-3'-phosphate
  modified_base 8: mod_base = OTHER; note = 2'-deoxy-2'-fluoroguanosine-3'-phosphate
  modified_base 9: mod_base = OTHER; note = 2'-deoxy-2'-fluorouridine-3'-phosphate
  modified_base 10: mod_base = OTHER; note = 2'-O-methyluridine-3'-phosphate
  modified_base 11: mod_base = OTHER; note = 2'-O-methylcytidine-3'-phosphate
  modified_base 12: mod_base = OTHER; note = 2'-O-methylcytidine-3'-phosphate
  modified_base 13: mod_base = OTHER; note = 2'-O-methylguanosine-3'-phosphate
  modified_base 14: mod_base = OTHER; note = 2'-deoxy-2'-fluoroadenosine-3'-phosphate
  modified_base 15: mod_base = OTHER; note = 2'-O-methylguanosine-3'-phosphate
  modified_base 16: mod_base = OTHER; note = 2'-deoxy-2'-fluoroadenosine-3'-phosphate
  modified_base 17: mod_base = OTHER; note = 2'-O-methyladenosine-3'-phosphate
  modified_base 18: mod_base = OTHER; note = 2'-O-methyluridine-3'-phosphate
  modified_base 19: mod_base = OTHER; note = 2'-O-methyladenosine-3'-phosphate
  modified_base 20: mod_base = OTHER; note = 2'-O-methyluridine-3'-phosphate
  modified_base 21: mod_base = OTHER; note = 2'-O-methyladenosine-3'-phosphorothioate
  modified_base 22: mod_base = OTHER; note = 2'-O-methyluridine-3'-phosphorothioate
  modified_base 23: mod_base = OTHER; note = 2'-O-methyladenosine
ttgcactgttccgagaatatata

SEQ ID NO: 1537 - RNA, 23 nt, synthetic construct
  source 1..23: mol_type = other RNA
  modified_base 1: mod_base = OTHER; note = 2'-O-methyluridine-3'-phosphorothioate 5'-(E)-Vinylphosphonate
  modified_base 2: mod_base = OTHER; note = 2'-deoxy-2'-fluoroadenosine-3'-phosphorothioate
  modified_base 3: mod_base = OTHER; note = 2'-O-methylguanosine-3'-phosphate
  modified_base 4: mod_base = OTHER; note = 2'-O-methylcytidine-3'-phosphate
  modified_base 5: mod_base = OTHER; note = 2'-O-methylcytidine-3'-phosphate
  modified_base 6: mod_base = OTHER; note = 2'-deoxy-2'-fluorocytidine-3'-phosphate
  modified_base 7: mod_base = OTHER; note = 2'-O-methyluridine-3'-phosphate
  modified_base 8: mod_base = OTHER; note = 2'-deoxy-2'-fluoroguanosine-3'-phosphate
  modified_base 9: mod_base = OTHER; note = 2'-deoxy-2'-fluorocytidine-3'-phosphate
  modified_base 10: mod_base = OTHER; note = 2'-O-methyladenosine-3'-phosphate
  modified_base 11: mod_base = OTHER; note = 2'-O-methylcytidine-3'-phosphate
  modified_base 12: mod_base = OTHER; note = 2'-O-methyluridine-3'-phosphate
  modified_base 13: mod_base = OTHER; note = 2'-O-methylguanosine-3'-phosphate
  modified_base 14: mod_base = OTHER; note = 2'-deoxy-2'-fluorouridine-3'-phosphate
  modified_base 15: mod_base = OTHER; note = 2'-O-methyluridine-3'-phosphate
  modified_base 16: mod_base = OTHER; note = 2'-deoxy-2'-fluorocytidine-3'-phosphate
  modified_base 17: mod_base = OTHER; note = 2'-O-methylcytidine-3'-phosphate
  modified_base 18: mod_base = OTHER; note = 2'-O-methylguanosine-3'-phosphate
  modified_base 19: mod_base = OTHER; note = 2'-O-methyladenosine-3'-phosphate
  modified_base 20: mod_base = OTHER; note = 2'-O-methylguanosine-3'-phosphate
  modified_base 21: mod_base = OTHER; note = 2'-O-methyladenosine-3'-phosphorothioate
  modified_base 22: mod_base = OTHER; note = 2'-O-methyladenosine-3'-phosphorothioate
  modified_base 23: mod_base = OTHER; note = 2'-O-methyluridine
tagccctgcactgttccgagaat

SEQ ID NO: 1538 - RNA, 23 nt, synthetic construct
  source 1..23: mol_type = other RNA
  modified_base 1: mod_base = OTHER; note = 2'-O-methyluridine-3'-phosphorothioate 5'-(E)-Vinylphosphonate
  modified_base 2: mod_base = OTHER; note = 2'-deoxy-2'-fluoroadenosine-3'-phosphorothioate
  modified_base 3: mod_base = OTHER; note = 2'-O-methylcytidine-3'-phosphate
  modified_base 4: mod_base = OTHER; note = 2'-O-methyluridine-3'-phosphate
  modified_base 5: mod_base = OTHER; note = 2'-O-methyluridine-3'-phosphate
  modified_base 6: mod_base = OTHER; note = 2'-deoxy-2'-fluorouridine-3'-phosphate
  modified_base 7: mod_base = OTHER; note = 2'-O-methylcytidine-3'-phosphate
  modified_base 8: mod_base = OTHER; note = 2'-deoxy-2'-fluorocytidine-3'-phosphate
  modified_base 9: mod_base = OTHER; note = 2'-deoxy-2'-fluorouridine-3'-phosphate
  modified_base 10: mod_base = OTHER; note = 2'-O-methyluridine-3'-phosphate
  modified_base 11: mod_base = OTHER; note = 2'-O-methylcytidine-3'-phosphate
  modified_base 12: mod_base = OTHER; note = 2'-O-methyluridine-3'-phosphate
  modified_base 13: mod_base = OTHER; note = 2'-O-methylcytidine-3'-phosphate
  modified_base 14: mod_base = OTHER; note = 2'-deoxy-2'-fluoroadenosine-3'-phosphate
  modified_base 15: mod_base = OTHER; note = 2'-O-methylguanosine-3'-phosphate
  modified_base 16: mod_base = OTHER; note = 2'-deoxy-2'-fluorocytidine-3'-phosphate
  modified_base 17: mod_base = OTHER; note = 2'-O-methylcytidine-3'-phosphate
  modified_base 18: mod_base = OTHER; note = 2'-O-methylcytidine-3'-phosphate
  modified_base 19: mod_base = OTHER; note = 2'-O-methyluridine-3'-phosphate
  modified_base 20: mod_base = OTHER; note = 2'-O-methylguanosine-3'-phosphate
  modified_base 21: mod_base = OTHER; note = 2'-O-methylcytidine-3'-phosphorothioate
  modified_base 22: mod_base = OTHER; note = 2'-O-methyladenosine-3'-phosphorothioate
  modified_base 23: mod_base = OTHER; note = 2'-O-methylcytidine
tactttccttctcagccctgcac

SEQ ID NO: 1539 - RNA, 23 nt, synthetic construct
  source 1..23: mol_type = other RNA
  modified_base 1: mod_base = OTHER; note = 2'-O-methyluridine-3'-phosphorothioate 5'-(E)-Vinylphosphonate
  modified_base 2: mod_base = OTHER; note = 2'-deoxy-2'-fluoroadenosine-3'-phosphorothioate
  modified_base 3: mod_base = OTHER; note = 2'-O-methylguanosine-3'-phosphate
  modified_base 4: mod_base = OTHER; note = 2'-O-methyladenosine-3'-phosphate
  modified_base 5: mod_base = OTHER; note = 2'-O-methylguanosine-3'-phosphate
  modified_base 6: mod_base = OTHER; note = 2'-deoxy-2'-fluorocytidine-3'-phosphate
  modified_base 7: mod_base = OTHER; note = 2'-O-methyladenosine-3'-phosphate
  modified_base 8: mod_base = OTHER; note = 2'-deoxy-2'-fluorocytidine-3'-phosphate
  modified_base 9: mod_base = OTHER; note = 2'-deoxy-2'-fluorouridine-3'-phosphate
  modified_base 10: mod_base = OTHER; note = 2'-O-methyluridine-3'-phosphate
  modified_base 11: mod_base = OTHER; note = 2'-O-methyluridine-3'-phosphate
  modified_base 12: mod_base = OTHER; note = 2'-O-methylcytidine-3'-phosphate
  modified_base 13: mod_base = OTHER; note = 2'-O-methylcytidine-3'-phosphate
  modified_base 14: mod_base = OTHER; note = 2'-deoxy-2'-fluorouridine-3'-phosphate
  modified_base 15: mod_base = OTHER; note = 2'-O-methyluridine-3'-phosphate
  modified_base 16: mod_base = OTHER; note = 2'-deoxy-2'-fluorocytidine-3'-phosphate
  modified_base 17: mod_base = OTHER; note = 2'-O-methyluridine-3'-phosphate
  modified_base 18: mod_base = OTHER; note = 2'-O-methylcytidine-3'-phosphate
  modified_base 19: mod_base = OTHER; note = 2'-O-methyladenosine-3'-phosphate
  modified_base 20: mod_base = OTHER; note = 2'-O-methylguanosine-3'-phosphate
  modified_base 21: mod_base = OTHER; note = 2'-O-methylcytidine-3'-phosphorothioate
  modified_base 22: mod_base = OTHER; note = 2'-O-methylcytidine-3'-phosphorothioate
  modified_base 23: mod_base = OTHER; note = 2'-O-methylcytidine
tagagcactttccttctcagccc

SEQ ID NO: 1540 - RNA, 23 nt, synthetic construct
  source 1..23: mol_type = other RNA
  modified_base 1: mod_base = OTHER; note = 2'-O-methyluridine-3'-phosphorothioate 5'-(E)-Vinylphosphonate
  modified_base 2: mod_base = OTHER; note = 2'-deoxy-2'-fluoroguanosine-3'-phosphorothioate
  modified_base 3: mod_base = OTHER; note = 2'-O-methylcytidine-3'-phosphate
  modified_base 4: mod_base = OTHER; note = 2'-O-methyladenosine-3'-phosphate
  modified_base 5: mod_base = OTHER; note = 2'-O-methylcytidine-3'-phosphate
  modified_base 6: mod_base = OTHER; note = 2'-deoxy-2'-fluorocytidine-3'-phosphate
  modified_base 7: mod_base = OTHER; note = 2'-O-methyladenosine-3'-phosphate
  modified_base 8: mod_base = OTHER; note = 2'-deoxy-2'-fluoroguanosine-3'-phosphate
  modified_base 9: mod_base = OTHER; note = 2'-deoxy-2'-fluoroadenosine-3'-phosphate
  modified_base 10: mod_base = OTHER; note = 2'-O-methylguanosine-3'-phosphate
  modified_base 11: mod_base = OTHER; note = 2'-O-methylcytidine-3'-phosphate
  modified_base 12: mod_base = OTHER; note = 2'-O-methyladenosine-3'-phosphate
  modified_base 13: mod_base = OTHER; note = 2'-O-methylcytidine-3'-phosphate
  modified_base 14: mod_base = OTHER; note = 2'-deoxy-2'-fluorouridine-3'-phosphate
  modified_base 15: mod_base = OTHER; note = 2'-O-methyluridine-3'-phosphate
  modified_base 16: mod_base = OTHER; note = 2'-deoxy-2'-fluorouridine-3'-phosphate
  modified_base 17: mod_base = OTHER; note = 2'-O-methylcytidine-3'-phosphate
  modified_base 18: mod_base = OTHER; note = 2'-O-methylcytidine-3'-phosphate
  modified_base 19: mod_base = OTHER; note = 2'-O-methyluridine-3'-phosphate
  modified_base 20: mod_base = OTHER; note = 2'-O-methyluridine-3'-phosphate
  modified_base 21: mod_base = OTHER; note = 2'-O-methylcytidine-3'-phosphorothioate
  modified_base 22: mod_base = OTHER; note = 2'-O-methyluridine-3'-phosphorothioate
  modified_base 23: mod_base = OTHER; note = 2'-O-methylcytidine
tgcaccagagcactttccttctc

SEQ ID NO: 1541 - RNA, 23 nt, synthetic construct
  source 1..23: mol_type = other RNA
  modified_base 1: mod_base = OTHER; note = 2'-O-methyluridine-3'-phosphorothioate 5'-(E)-Vinylphosphonate
  modified_base 2: mod_base = OTHER; note = 2'-deoxy-2'-fluorocytidine-3'-phosphorothioate
  modified_base 3: mod_base = OTHER; note = 2'-O-methyluridine-3'-phosphate
  modified_base 4: mod_base = OTHER; note = 2'-O-methyladenosine-3'-phosphate
  modified_base 5: mod_base = OTHER; note = 2'-O-methyluridine-3'-phosphate
  modified_base 6: mod_base = OTHER; note = 2'-deoxy-2'-fluoroguanosine-3'-phosphate
  modified_base 7: mod_base = OTHER; note = 2'-O-methyluridine-3'-phosphate
  modified_base 8: mod_base = OTHER; note = 2'-deoxy-2'-fluoroadenosine-3'-phosphate
  modified_base 9: mod_base = OTHER; note = 2'-deoxy-2'-fluorouridine-3'-phosphate
  modified_base 10: mod_base = OTHER; note = 2'-O-methyluridine-3'-phosphate
  modified_base 11: mod_base = OTHER; note = 2'-O-methylguanosine-3'-phosphate
  modified_base 12: mod_base = OTHER; note = 2'-O-methylguanosine-3'-phosphate
  modified_base 13: mod_base = OTHER; note = 2'-O-methyladenosine-3'-phosphate
  modified_base 14: mod_base = OTHER; note = 2'-deoxy-2'-fluoroguanosine-3'-phosphate
  modified_base 15: mod_base = OTHER; note = 2'-O-methylguanosine-3'-phosphate
  modified_base 16: mod_base = OTHER; note = 2'-deoxy-2'-fluorocytidine-3'-phosphate
  modified_base 17: mod_base = OTHER; note = 2'-O-methyladenosine-3'-phosphate
  modified_base 18: mod_base = OTHER; note = 2'-O-methylcytidine-3'-phosphate
  modified_base 19: mod_base = OTHER; note = 2'-O-methylcytidine-3'-phosphate
  modified_base 20: mod_base = OTHER; note = 2'-O-methyladenosine-3'-phosphate
  modified_base 21: mod_base = OTHER; note = 2'-O-methylguanosine-3'-phosphorothioate
  modified_base 22: mod_base = OTHER; note = 2'-O-methyladenosine-3'-phosphorothioate
  modified_base 23: mod_base = OTHER; note = 2'-O-methylguanosine
tctatgtattggaggcaccagag

SEQ ID NO: 1542 - RNA, 23 nt, synthetic construct
  source 1..23: mol_type = other RNA
  modified_base 1: mod_base = OTHER; note = 2'-O-methyluridine-3'-phosphorothioate 5'-(E)-Vinylphosphonate
  modified_base 2: mod_base = OTHER; note = 2'-deoxy-2'-fluorocytidine-3'-phosphorothioate
  modified_base 3: mod_base = OTHER; note = 2'-O-methylcytidine-3'-phosphate
  modified_base 4: mod_base = OTHER; note = 2'-O-methyladenosine-3'-phosphate
  modified_base 5: mod_base = OTHER; note = 2'-O-methylguanosine-3'-phosphate
  modified_base 6: mod_base = OTHER; note = 2'-deoxy-2'-fluoroguanosine-3'-phosphate
  modified_base 7: mod_base = OTHER; note = 2'-O-methylcytidine-3'-phosphate
  modified_base 8: mod_base = OTHER; note = 2'-deoxy-2'-fluorocytidine-3'-phosphate
  modified_base 9: mod_base = OTHER; note = 2'-deoxy-2'-fluorouridine-3'-phosphate
  modified_base 10: mod_base = OTHER; note = 2'-O-methyladenosine-3'-phosphate
  modified_base 11: mod_base = OTHER; note = 2'-O-methyluridine-3'-phosphate
  modified_base 12: mod_base = OTHER; note = 2'-O-methylguanosine-3'-phosphate
  modified_base 13: mod_base = OTHER; note = 2'-O-methyluridine-3'-phosphate
  modified_base 14: mod_base = OTHER; note = 2'-deoxy-2'-fluoroadenosine-3'-phosphate
  modified_base 15: mod_base = OTHER; note = 2'-O-methyluridine-3'-phosphate
  modified_base 16: mod_base = OTHER; note = 2'-deoxy-2'-fluorouridine-3'-phosphate
  modified_base 17: mod_base = OTHER; note = 2'-O-methylguanosine-3'-phosphate
  modified_base 18: mod_base = OTHER; note = 2'-O-methylguanosine-3'-phosphate
  modified_base 19: mod_base = OTHER; note = 2'-O-methyladenosine-3'-phosphate
  modified_base 20: mod_base = OTHER; note = 2'-O-methylguanosine-3'-phosphate
  modified_base 21: mod_base = OTHER; note = 2'-O-methylguanosine-3'-phosphorothioate
  modified_base 22: mod_base = OTHER; note = 2'-O-methylcytidine-3'-phosphorothioate
  modified_base 23: mod_base = OTHER; note = 2'-O-methyladenosine
tccaggcctatgtattggaggca

SEQ ID NO: 1543 - RNA, 23 nt, synthetic construct
  source 1..23: mol_type = other RNA
  modified_base 1: mod_base = OTHER; note = 2'-O-methyluridine-3'-phosphorothioate 5'-(E)-Vinylphosphonate
  modified_base 2: mod_base = OTHER; note = 2'-deoxy-2'-fluoroadenosine-3'-phosphorothioate
  modified_base 3: mod_base = OTHER; note = 2'-O-methyladenosine-3'-phosphate
  modified_base 4: mod_base = OTHER; note = 2'-O-methyladenosine-3'-phosphate
  modified_base 5: mod_base = OTHER; note = 2'-O-methyladenosine-3'-phosphate
  modified_base 6: mod_base = OTHER; note = 2'-deoxy-2'-fluorocytidine-3'-phosphate
  modified_base 7: mod_base = OTHER; note = 2'-O-methylcytidine-3'-phosphate
  modified_base 8: mod_base = OTHER; note = 2'-deoxy-2'-fluorocytidine-3'-phosphate
  modified_base 9: mod_base = OTHER; note = 2'-deoxy-2'-fluoroadenosine-3'-phosphate
  modified_base 10: mod_base = OTHER; note = 2'-O-methylguanosine-3'-phosphate
  modified_base 11: mod_base = OTHER; note = 2'-O-methylguanosine-3'-phosphate
  modified_base 12: mod_base = OTHER; note = 2'-O-methylcytidine-3'-phosphate
  modified_base 13: mod_base = OTHER; note = 2'-O-methylcytidine-3'-phosphate
  modified_base 14: mod_base = OTHER; note = 2'-deoxy-2'-fluorouridine-3'-phosphate
  modified_base 15: mod_base = OTHER; note = 2'-O-methyladenosine-3'-phosphate
  modified_base 16: mod_base = OTHER; note = 2'-deoxy-2'-fluorouridine-3'-phosphate
  modified_base 17: mod_base = OTHER; note = 2'-O-methylguanosine-3'-phosphate
  modified_base 18: mod_base = OTHER; note = 2'-O-methyluridine-3'-phosphate
  modified_base 19: mod_base = OTHER; note = 2'-O-methyladenosine-3'-phosphate
  modified_base 20: mod_base = OTHER; note = 2'-O-methyluridine-3'-phosphate
  modified_base 21: mod_base = OTHER; note = 2'-O-methyluridine-3'-phosphorothioate
  modified_base 22: mod_base = OTHER; note = 2'-O-methylguanosine-3'-phosphorothioate
  modified_base 23: mod_base = OTHER; note = 2'-O-methylguanosine
taaaacccaggcctatgtattgg

SEQ ID NO: 1544 - RNA, 23 nt, synthetic construct
  source 1..23: mol_type = other RNA
  modified_base 1: mod_base = OTHER; note = 2'-O-methyluridine-3'-phosphorothioate 5'-(E)-Vinylphosphonate
  modified_base 2: mod_base = OTHER; note = 2'-deoxy-2'-fluorouridine-3'-phosphorothioate
  modified_base 3: mod_base = OTHER; note = 2'-O-methylcytidine-3'-phosphate
  modified_base 4: mod_base = OTHER; note = 2'-O-methyluridine-3'-phosphate
  modified_base 5: mod_base = OTHER; note = 2'-O-methyluridine-3'-phosphate
  modified_base 6: mod_base = OTHER; note = 2'-deoxy-2'-fluorouridine-3'-phosphate
  modified_base 7: mod_base = OTHER; note = 2'-O-methyluridine-3'-phosphate
  modified_base 8: mod_base = OTHER; note = 2'-deoxy-2'-fluoroguanosine-3'-phosphate
  modified_base 9: mod_base = OTHER; note = 2'-deoxy-2'-fluorouridine-3'-phosphate
  modified_base 10: mod_base = OTHER; note = 2'-O-methyluridine-3'-phosphate
  modified_base 11: mod_base = OTHER; note = 2'-O-methyluridine-3'-phosphate
  modified_base 12: mod_base = OTHER; note = 2'-O-methylguanosine-3'-phosphate
  modified_base 13: mod_base = OTHER; note = 2'-O-methylcytidine-3'-phosphate
  modified_base 14: mod_base = OTHER; note = 2'-deoxy-2'-fluoroadenosine-3'-phosphate
  modified_base 15: mod_base = OTHER; note = 2'-O-methylguanosine-3'-phosphate
  modified_base 16: mod_base = OTHER; note = 2'-deoxy-2'-fluorocytidine-3'-phosphate
  modified_base 17: mod_base = OTHER; note = 2'-O-methyladenosine-3'-phosphate
  modified_base 18: mod_base = OTHER; note = 2'-O-methylguanosine-3'-phosphate
  modified_base 19: mod_base = OTHER; note = 2'-O-methyladenosine-3'-phosphate
  modified_base 20: mod_base = OTHER; note = 2'-O-methyladenosine-3'-phosphate
  modified_base 21: mod_base = OTHER; note = 2'-O-methyladenosine-3'-phosphorothioate
  modified_base 22: mod_base = OTHER; note = 2'-O-methyladenosine-3'-phosphorothioate
  modified_base 23: mod_base = OTHER; note = 2'-O-methyladenosine
ttcttttgtttgcagcagaaaaa

SEQ ID NO: 1545 - RNA, 23 nt, synthetic construct
  source 1..23: mol_type = other RNA
  modified_base 1: mod_base = OTHER; note = 2'-O-methyluridine-3'-phosphorothioate 5'-(E)-Vinylphosphonate
  modified_base 2: mod_base = OTHER; note = 2'-deoxy-2'-fluoroadenosine-3'-phosphorothioate
  modified_base 3: mod_base = OTHER; note = 2'-O-methylguanosine-3'-phosphate
  modified_base 4: mod_base = OTHER; note = 2'-O-methyluridine-3'-phosphate
  modified_base 5: mod_base = OTHER; note = 2'-O-methylcytidine-3'-phosphate
  modified_base 6: mod_base = OTHER; note = 2'-deoxy-2'-fluoroguanosine-3'-phosphate
  modified_base 7: mod_base = OTHER; note = 2'-O-methyladenosine-3'-phosphate
  modified_base 8: mod_base = OTHER; note = 2'-deoxy-2'-fluoroguanosine-3'-phosphate
  modified_base 9: mod_base = OTHER; note = 2'-deoxy-2'-fluorouridine-3'-phosphate
  modified_base 10: mod_base = OTHER; note = 2'-O-methylcytidine-3'-phosphate
  modified_base 11: mod_base = OTHER; note = 2'-O-methyluridine-3'-phosphate
  modified_base 12: mod_base = OTHER; note = 2'-O-methyluridine-3'-phosphate
  modified_base 13: mod_base = OTHER; note = 2'-O-methyluridine-3'-phosphate
  modified_base 14: mod_base = OTHER; note = 2'-deoxy-2'-fluorouridine-3'-phosphate
  modified_base 15: mod_base = OTHER; note = 2'-O-methylguanosine-3'-phosphate
  modified_base 16: mod_base = OTHER; note = 2'-deoxy-2'-fluorouridine-3'-phosphate
  modified_base 17: mod_base = OTHER; note = 2'-O-methyluridine-3'-phosphate
  modified_base 18: mod_base = OTHER; note = 2'-O-methyluridine-3'-phosphate
  modified_base 19: mod_base = OTHER; note = 2'-O-methylguanosine-3'-phosphate
  modified_base 20: mod_base = OTHER; note = 2'-O-methylcytidine-3'-phosphate
  modified_base 21: mod_base = OTHER; note = 2'-O-methyladenosine-3'-phosphorothioate
  modified_base 22: mod_base = OTHER; note = 2'-O-methylguanosine-3'-phosphorothioate
  modified_base 23: mod_base = OTHER; note = 2'-O-methylcytidine
tagtcgagtcttttgtttgcagc

SEQ ID NO: 1546 - RNA, 23 nt, synthetic construct
  source 1..23: mol_type = other RNA
  modified_base 1: mod_base = OTHER; note = 2'-O-methyluridine-3'-phosphorothioate 5'-(E)-Vinylphosphonate
  modified_base 2: mod_base = OTHER; note = 2'-deoxy-2'-fluorocytidine-3'-phosphorothioate
  modified_base 3: mod_base = OTHER; note = 2'-O-methyluridine-3'-phosphate
  modified_base 4: mod_base = OTHER; note = 2'-O-methylcytidine-3'-phosphate
  modified_base 5: mod_base = OTHER; note = 2'-O-methylguanosine-3'-phosphate
  modified_base 6: mod_base = OTHER; note = 2'-deoxy-2'-fluoroadenosine-3'-phosphate
  modified_base 7: mod_base = OTHER; note = 2'-O-methyladenosine-3'-phosphate
  modified_base 8: mod_base = OTHER; note = 2'-deoxy-2'-fluoroguanosine-3'-phosphate
  modified_base 9: mod_base = OTHER; note = 2'-deoxy-2'-fluorouridine-3'-phosphate
  modified_base 10: mod_base = OTHER; note = 2'-O-methylcytidine-3'-phosphate
  modified_base 11: mod_base = OTHER; note = 2'-O-methylguanosine-3'-phosphate
  modified_base 12: mod_base = OTHER; note = 2'-O-methyladenosine-3'-phosphate
  modified_base 13: mod_base = OTHER; note = 2'-O-methylguanosine-3'-phosphate
  modified_base 14: mod_base = OTHER; note = 2'-deoxy-2'-fluorouridine-3'-phosphate
  modified_base 15: mod_base = OTHER; note = 2'-O-methylcytidine-3'-phosphate
  modified_base 16: mod_base = OTHER; note = 2'-deoxy-2'-fluorouridine-3'-phosphate
  modified_base 17: mod_base = OTHER; note = 2'-O-methyluridine-3'-phosphate
  modified_base 18: mod_base = OTHER; note = 2'-O-methyluridine-3'-phosphate
  modified_base 19: mod_base = OTHER; note = 2'-O-methyluridine-3'-phosphate
  modified_base 20: mod_base = OTHER; note = 2'-O-methylguanosine-3'-phosphate
  modified_base 21: mod_base = OTHER; note = 2'-O-methyluridine-3'-phosphorothioate
  modified_base 22: mod_base = OTHER; note = 2'-O-methyluridine-3'-phosphorothioate
  modified_base 23: mod_base = OTHER; note = 2'-O-methyluridine
tctcgaagtcgagtcttttgttt

SEQ ID NO: 1547 - RNA, 23 nt, synthetic construct
  source 1..23: mol_type = other RNA
  modified_base 1: mod_base = OTHER; note = 2'-O-methyluridine-3'-phosphorothioate 5'-(E)-Vinylphosphonate
  modified_base 2: mod_base = OTHER; note = 2'-deoxy-2'-fluorocytidine-3'-phosphorothioate
  modified_base 3: mod_base = OTHER; note = 2'-O-methyladenosine-3'-phosphate
  modified_base 4: mod_base = OTHER; note = 2'-O-methyluridine-3'-phosphate
  modified_base 5: mod_base = OTHER; note = 2'-O-methylguanosine-3'-phosphate
  modified_base 6: mod_base = OTHER; note = 2'-deoxy-2'-fluoroguanosine-3'-phosphate
  modified_base 7: mod_base = OTHER; note = 2'-O-methylcytidine-3'-phosphate
  modified_base 8: mod_base = OTHER; note = 2'-deoxy-2'-fluorouridine-3'-phosphate
  modified_base 9: mod_base = OTHER; note = 2'-deoxy-2'-fluorocytidine-3'-phosphate
  modified_base 10: mod_base = OTHER; note = 2'-O-methylguanosine-3'-phosphate
  modified_base 11: mod_base = OTHER; note = 2'-O-methyladenosine-3'-phosphate
  modified_base 12: mod_base = OTHER; note = 2'-O-methyladenosine-3'-phosphate
  modified_base 13: mod_base = OTHER; note = 2'-O-methylguanosine-3'-phosphate
  modified_base 14: mod_base = OTHER; note = 2'-deoxy-2'-fluorouridine-3'-phosphate
  modified_base 15: mod_base = OTHER; note = 2'-O-methylcytidine-3'-phosphate
  modified_base 16: mod_base = OTHER; note = 2'-deoxy-2'-fluoroguanosine-3'-phosphate
  modified_base 17: mod_base = OTHER; note = 2'-O-methyladenosine-3'-phosphate
  modified_base 18: mod_base = OTHER; note = 2'-O-methylguanosine-3'-phosphate
  modified_base 19: mod_base = OTHER; note = 2'-O-methyluridine-3'-phosphate
  modified_base 20: mod_base = OTHER; note = 2'-O-methylcytidine-3'-phosphate
  modified_base 21: mod_base = OTHER; note = 2'-O-methyluridine-3'-phosphorothioate
  modified_base 22: mod_base = OTHER; note = 2'-O-methyluridine-3'-phosphorothioate
  modified_base 23: mod_base = OTHER; note = 2'-O-methyluridine
tcatggctcgaagtcgagtcttt

SEQ ID NO: 1548 - RNA, 23 nt, synthetic construct
  source 1..23: mol_type = other RNA
  modified_base 1: mod_base = OTHER; note = 2'-O-methyluridine-3'-phosphorothioate 5'-(E)-Vinylphosphonate
  modified_base 2: mod_base = OTHER; note = 2'-deoxy-2'-fluorouridine-3'-phosphorothioate
  modified_base 3: mod_base = OTHER; note = 2'-O-methyluridine-3'-phosphate
  modified_base 4: mod_base = OTHER; note = 2'-O-methyluridine-3'-phosphate
  modified_base 5: mod_base = OTHER; note = 2'-O-methyluridine-3'-phosphate
  modified_base 6: mod_base = OTHER; note = 2'-deoxy-2'-fluorocytidine-3'-phosphate
  modified_base 7: mod_base = OTHER; note = 2'-O-methylcytidine-3'-phosphate
  modified_base 8: mod_base = OTHER; note = 2'-deoxy-2'-fluorocytidine-3'-phosphate
  modified_base 9: mod_base = OTHER; note = 2'-deoxy-2'-fluoroadenosine-3'-phosphate
  modified_base 10: mod_base = OTHER; note = 2'-O-methyluridine-3'-phosphate
  modified_base 11: mod_base = OTHER; note = 2'-O-methylguanosine-3'-phosphate
  modified_base 12: mod_base = OTHER; note = 2'-O-methylguanosine-3'-phosphate
  modified_base 13: mod_base = OTHER; note = 2'-O-methylcytidine-3'-phosphate
  modified_base 14: mod_base = OTHER; note = 2'-deoxy-2'-fluorouridine-3'-phosphate
  modified_base 15: mod_base = OTHER; note = 2'-O-methylcytidine-3'-phosphate
  modified_base 16: mod_base = OTHER; note = 2'-deoxy-2'-fluoroguanosine-3'-phosphate
  modified_base 17: mod_base = OTHER; note = 2'-O-methyladenosine-3'-phosphate
  modified_base 18: mod_base = OTHER; note = 2'-O-methyladenosine-3'-phosphate
  modified_base 19: mod_base = OTHER; note = 2'-O-methylguanosine-3'-phosphate
  modified_base 20: mod_base = OTHER; note = 2'-O-methyluridine-3'-phosphate
  modified_base 21: mod_base = OTHER; note = 2'-O-methylcytidine-3'-phosphorothioate
  modified_base 22: mod_base = OTHER; note = 2'-O-methylguanosine-3'-phosphorothioate
  modified_base 23: mod_base = OTHER; note = 2'-O-methyladenosine
tttttcccatggctcgaagtcga

SEQ ID NO: 1549 - RNA, 23 nt, synthetic construct
  source 1..23: mol_type = other RNA
  modified_base 1: mod_base = OTHER; note = 2'-O-methyluridine-3'-phosphorothioate 5'-(E)-Vinylphosphonate
  modified_base 2: mod_base = OTHER; note = 2'-deoxy-2'-fluorouridine-3'-phosphorothioate
  modified_base 3: mod_base = OTHER; note = 2'-O-methyluridine-3'-phosphate
  modified_base 4: mod_base = OTHER; note = 2'-O-methylcytidine-3'-phosphate
  modified_base 5: mod_base = OTHER; note = 2'-O-methylcytidine-3'-phosphate
  modified_base 6: mod_base = OTHER; note = 2'-deoxy-2'-fluorocytidine-3'-phosphate
  modified_base 7: mod_base = OTHER; note = 2'-O-methyluridine-3'-phosphate
  modified_base 8: mod_base = OTHER; note = 2'-deoxy-2'-fluorouridine-3'-phosphate
  modified_base 9: mod_base = OTHER; note = 2'-deoxy-2'-fluorouridine-3'-phosphate
  modified_base 10: mod_base = OTHER; note = 2'-O-methyluridine-3'-phosphate
  modified_base 11: mod_base = OTHER; note = 2'-O-methylcytidine-3'-phosphate
  modified_base 12: mod_base = OTHER; note = 2'-O-methylcytidine-3'-phosphate
  modified_base 13: mod_base = OTHER; note = 2'-O-methylcytidine-3'-phosphate
  modified_base 14: mod_base = OTHER; note = 2'-deoxy-2'-fluoroadenosine-3'-phosphate
  modified_base 15: mod_base = OTHER; note = 2'-O-methyluridine-3'-phosphate
  modified_base 16: mod_base = OTHER; note = 2'-deoxy-2'-fluoroguanosine-3'-phosphate
  modified_base 17: mod_base = OTHER; note = 2'-O-methylguanosine-3'-phosphate
  modified_base 18: mod_base = OTHER; note = 2'-O-methylcytidine-3'-phosphate
  modified_base 19: mod_base = OTHER; note = 2'-O-methyluridine-3'-phosphate
  modified_base 20: mod_base = OTHER; note = 2'-O-methylcytidine-3'-phosphate
  modified_base 21: mod_base = OTHER; note = 2'-O-methylguanosine-3'-phosphorothioate
  modified_base 22: mod_base = OTHER; note = 2'-O-methyladenosine-3'-phosphorothioate
  modified_base 23: mod_base = OTHER; note = 2'-O-methyladenosine
tttcccttttcccatggctcgaa

SEQ ID NO: 1550 - RNA, 23 nt, synthetic construct
  source 1..23: mol_type = other RNA
  modified_base 1: mod_base = OTHER; note = 2'-O-methyluridine-3'-phosphorothioate 5'-(E)-Vinylphosphonate
  modified_base 2: mod_base = OTHER; note = 2'-deoxy-2'-fluorocytidine-3'-phosphorothioate
  modified_base 3: mod_base = OTHER; note = 2'-O-methylguanosine-3'-phosphate
  modified_base 4: mod_base = OTHER; note = 2'-O-methyladenosine-3'-phosphate
  modified_base 5: mod_base = OTHER; note = 2'-O-methylguanosine-3'-phosphate
  modified_base 6: mod_base = OTHER; note = 2'-deoxy-2'-fluoroguanosine-3'-phosphate
  modified_base 7: mod_base = OTHER; note = 2'-O-methyluridine-3'-phosphate
  modified_base 8: mod_base = OTHER; note = 2'-deoxy-2'-fluorouridine-3'-phosphate
  modified_base 9: mod_base = OTHER; note = 2'-deoxy-2'-fluorocytidine-3'-phosphate
  modified_base 10: mod_base = OTHER; note = 2'-O-methylcytidine-3'-phosphate
  modified_base 11: mod_base = OTHER; note = 2'-O-methylcytidine-3'-phosphate
  modified_base 12: mod_base = OTHER; note = 2'-O-methyluridine-3'-phosphate
  modified_base 13: mod_base = OTHER; note = 2'-O-methyluridine-3'-phosphate
  modified_base 14: mod_base = OTHER; note = 2'-deoxy-2'-fluorouridine-3'-phosphate
  modified_base 15: mod_base = OTHER; note = 2'-O-methyluridine-3'-phosphate
  modified_base 16: mod_base = OTHER; note = 2'-deoxy-2'-fluorocytidine-3'-phosphate
  modified_base 17: mod_base = OTHER; note = 2'-O-methylcytidine-3'-phosphate
  modified_base 18: mod_base = OTHER; note = 2'-O-methylcytidine-3'-phosphate
  modified_base 19: mod_base = OTHER; note = 2'-O-methyladenosine-3'-phosphate
  modified_base 20: mod_base = OTHER; note = 2'-O-methyluridine-3'-phosphate
  modified_base 21: mod_base = OTHER; note = 2'-O-methylguanosine-3'-phosphorothioate
  modified_base 22: mod_base = OTHER; note = 2'-O-methylguanosine-3'-phosphorothioate
  modified_base 23: mod_base = OTHER; note = 2'-O-methylcytidine
tcgaggttcccttttcccatggc

SEQ ID NO: 1551 - RNA, 23 nt, synthetic construct
  source 1..23: mol_type = other RNA
  modified_base 1: mod_base = OTHER; note = 2'-O-methyluridine-3'-phosphorothioate 5'-(E)-Vinylphosphonate
  modified_base 2: mod_base = OTHER; note = 2'-deoxy-2'-fluorouridine-3'-phosphorothioate
  modified_base 3: mod_base = OTHER; note = 2'-O-methyluridine-3'-phosphate
  modified_base 4: mod_base = OTHER; note = 2'-O-methylguanosine-3'-phosphate
  modified_base 5: mod_base = OTHER; note = 2'-O-methyladenosine-3'-phosphate
  modified_base 6: mod_base = OTHER; note = 2'-deoxy-2'-fluorocytidine-3'-phosphate
  modified_base 7: mod_base = OTHER; note = 2'-O-methyluridine-3'-phosphate
  modified_base 8: mod_base = OTHER; note = 2'-deoxy-2'-fluorouridine-3'-phosphate
  modified_base 9: mod_base = OTHER; note = 2'-deoxy-2'-fluorocytidine-3'-phosphate
  modified_base 10: mod_base = OTHER; note = 2'-O-methylguanosine-3'-phosphate
  modified_base 11: mod_base = OTHER; note = 2'-O-methyladenosine-3'-phosphate
  modified_base 12: mod_base = OTHER; note = 2'-O-methylguanosine-3'-phosphate
  modified_base 13: mod_base = OTHER; note = 2'-O-methylguanosine-3'-phosphate
  modified_base 14: mod_base = OTHER; note = 2'-deoxy-2'-fluorouridine-3'-phosphate
  modified_base 15: mod_base = OTHER; note = 2'-O-methyluridine-3'-phosphate
  modified_base 16: mod_base = OTHER; note = 2'-deoxy-2'-fluorocytidine-3'-phosphate
  modified_base 17: mod_base = OTHER; note = 2'-O-methylcytidine-3'-phosphate
  modified_base 18: mod_base = OTHER; note = 2'-O-methylcytidine-3'-phosphate
  modified_base 19: mod_base = OTHER; note = 2'-O-methyluridine-3'-phosphate
  modified_base 20: mod_base = OTHER; note = 2'-O-methyluridine-3'-phosphate
  modified_base 21: mod_base = OTHER; note = 2'-O-methyluridine-3'-phosphorothioate
  modified_base 22: mod_base = OTHER; note = 2'-O-methyluridine-3'-phosphorothioate
  modified_base 23: mod_base = OTHER; note = 2'-O-methylcytidine
tttgacttcgaggttcccttttc

SEQ ID NO: 1552 - RNA, 23 nt, synthetic construct
  source 1..23: mol_type = other RNA
  modified_base 1: mod_base = OTHER; note = 2'-O-methyluridine-3'-phosphorothioate 5'-(E)-Vinylphosphonate
  modified_base 2: mod_base = OTHER; note = 2'-deoxy-2'-fluorouridine-3'-phosphorothioate
  modified_base 3: mod_base = OTHER; note = 2'-O-methyluridine-3'-phosphate
  modified_base 4: mod_base = OTHER; note = 2'-O-methyluridine-3'-phosphate
  modified_base 5: mod_base = OTHER; note = 2'-O-methylcytidine-3'-phosphate
  modified_base 6: mod_base = OTHER; note = 2'-deoxy-2'-fluorouridine-3'-phosphate
  modified_base 7: mod_base = OTHER; note = 2'-O-methylguanosine-3'-phosphate
  modified_base 8: mod_base = OTHER; note = 2'-deoxy-2'-fluorouridine-3'-phosphate
  modified_base 9: mod_base = OTHER; note = 2'-deoxy-2'-fluorouridine-3'-phosphate
  modified_base 10: mod_base = OTHER; note = 2'-O-methylguanosine-3'-phosphate
  modified_base 11: mod_base = OTHER; note = 2'-O-methyladenosine-3'-phosphate
  modified_base 12: mod_base = OTHER; note = 2'-O-methylcytidine-3'-phosphate
  modified_base 13: mod_base = OTHER; note = 2'-O-methyluridine-3'-phosphate
  modified_base 14: mod_base = OTHER; note = 2'-deoxy-2'-fluorouridine-3'-phosphate
  modified_base 15: mod_base = OTHER; note = 2'-O-methylcytidine-3'-phosphate
  modified_base 16: mod_base = OTHER; note = 2'-deoxy-2'-fluoroguanosine-3'-phosphate
  modified_base 17: mod_base = OTHER; note = 2'-O-methyladenosine-3'-phosphate
  modified_base 18: mod_base = OTHER; note = 2'-O-methylguanosine-3'-phosphate
  modified_base 19: mod_base = OTHER; note = 2'-O-methylguanosine-3'-phosphate
  modified_base 20: mod_base = OTHER; note = 2'-O-methyluridine-3'-phosphate
  modified_base 21: mod_base = OTHER; note = 2'-O-methyluridine-3'-phosphorothioate
  modified_base 22: mod_base = OTHER; note = 2'-O-methylcytidine-3'-phosphorothioate
  modified_base 23: mod_base = OTHER; note = 2'-O-methylcytidine
ttttctgttgacttcgaggttcc

SEQ ID NO: 1553 - RNA, 23 nt, synthetic construct
  source 1..23: mol_type = other RNA
  modified_base 1: mod_base = OTHER; note = 2'-O-methyluridine-3'-phosphorothioate 5'-(E)-Vinylphosphonate
  modified_base 2: mod_base = OTHER; note = 2'-deoxy-2'-fluoroguanosine-3'-phosphorothioate
  modified_base 3: mod_base = OTHER; note = 2'-O-methyladenosine-3'-phosphate
  modified_base 4: mod_base = OTHER; note = 2'-O-methyluridine-3'-phosphate
  modified_base 5: mod_base = OTHER; note = 2'-O-methyluridine-3'-phosphate
  modified_base 6: mod_base = OTHER; note = 2'-deoxy-2'-fluorouridine-3'-phosphate
  modified_base 7: mod_base = OTHER; note = 2'-O-methylguanosine-3'-phosphate
  modified_base 8: mod_base = OTHER; note = 2'-deoxy-2'-fluorouridine-3'-phosphate
  modified_base 9: mod_base = OTHER; note = 2'-deoxy-2'-fluorouridine-3'-phosphate
  modified_base 10: mod_base = OTHER; note = 2'-O-methyluridine-3'-phosphate
  modified_base 11: mod_base = OTHER; note = 2'-O-methylcytidine-3'-phosphate
  modified_base 12: mod_base = OTHER; note = 2'-O-methyluridine-3'-phosphate
  modified_base 13: mod_base = OTHER; note = 2'-O-methylguanosine-3'-phosphate
  modified_base 14: mod_base = OTHER; note = 2'-deoxy-2'-fluorouridine-3'-phosphate
  modified_base 15: mod_base = OTHER; note = 2'-O-methyluridine-3'-phosphate
  modified_base 16: mod_base = OTHER; note = 2'-deoxy-2'-fluoroguanosine-3'-phosphate
  modified_base 17: mod_base = OTHER; note = 2'-O-methyladenosine-3'-phosphate
  modified_base 18: mod_base = OTHER; note = 2'-O-methylcytidine-3'-phosphate
  modified_base 19: mod_base = OTHER; note = 2'-O-methyluridine-3'-phosphate
  modified_base 20: mod_base = OTHER; note = 2'-O-methyluridine-3'-phosphate
  modified_base 21: mod_base = OTHER; note = 2'-O-methylcytidine-3'-phosphorothioate
  modified_base 22: mod_base = OTHER; note = 2'-O-methylguanosine-3'-phosphorothioate
  modified_base 23: mod_base = OTHER; note = 2'-O-methyladenosine
tgatttgtttctgttgacttcga

SEQ ID NO: 1554 - RNA, 23 nt, synthetic construct
  source 1..23: mol_type = other RNA
  modified_base 1: mod_base = OTHER; note = 2'-O-methyluridine-3'-phosphorothioate 5'-(E)-Vinylphosphonate
  modified_base 2: mod_base = OTHER; note = 2'-deoxy-2'-fluoroguanosine-3'-phosphorothioate
  modified_base 3: mod_base = OTHER; note = 2'-O-methylguanosine-3'-phosphate
  modified_base 4: mod_base = OTHER; note = 2'-O-methylguanosine-3'-phosphate
  modified_base 5: mod_base = OTHER; note = 2'-O-methyladenosine-3'-phosphate
  modified_base 6: mod_base = OTHER; note = 2'-deoxy-2'-fluoroguanosine-3'-phosphate
  modified_base 7: mod_base = OTHER; note = 2'-O-methylguanosine-3'-phosphate
  modified_base 8: mod_base = OTHER; note = 2'-deoxy-2'-fluoroadenosine-3'-phosphate
  modified_base 9: mod_base = OTHER; note = 2'-deoxy-2'-fluorouridine-3'-phosphate
  modified_base 10: mod_base = OTHER; note = 2'-O-methyluridine-3'-phosphate
  modified_base 11: mod_base = OTHER; note = 2'-O-methyluridine-3'-phosphate
  modified_base 12: mod_base = OTHER; note = 2'-O-methylguanosine-3'-phosphate
  modified_base 13: mod_base = OTHER; note = 2'-O-methyluridine-3'-phosphate
  modified_base 14: mod_base = OTHER; note = 2'-deoxy-2'-fluorouridine-3'-phosphate
  modified_base 15: mod_base = OTHER; note = 2'-O-methyluridine-3'-phosphate
  modified_base 16: mod_base = OTHER; note = 2'-deoxy-2'-fluorocytidine-3'-phosphate
  modified_base 17: mod_base = OTHER; note = 2'-O-methyluridine-3'-phosphate
  modified_base 18: mod_base = OTHER; note = 2'-O-methylguanosine-3'-phosphate
  modified_base 19: mod_base = OTHER; note = 2'-O-methyluridine-3'-phosphate
  modified_base 20: mod_base = OTHER; note = 2'-O-methyluridine-3'-phosphate
  modified_base 21: mod_base = OTHER; note = 2'-O-methylguanosine-3'-phosphorothioate
  modified_base 22: mod_base = OTHER; note = 2'-O-methyladenosine-3'-phosphorothioate
  modified_base 23: mod_base = OTHER; note = 2'-O-methylcytidine
tgggaggatttgtttctgttgac

SEQ ID NO: 1555 - RNA, 23 nt, synthetic construct
  source 1..23: mol_type = other RNA
  modified_base 1: mod_base = OTHER; note = 2'-O-methyluridine-3'-phosphorothioate 5'-(E)-Vinylphosphonate
  modified_base 2: mod_base = OTHER; note = 2'-deoxy-2'-fluorocytidine-3'-phosphorothioate
  modified_base 3: mod_base = OTHER; note = 2'-O-methyladenosine-3'-phosphate
  modified_base 4: mod_base = OTHER; note = 2'-O-methyluridine-3'-phosphate
  modified_base 5: mod_base = OTHER; note = 2'-O-methylguanosine-3'-phosphate
  modified_base 6: mod_base = OTHER; note = 2'-deoxy-2'-fluoroadenosine-3'-phosphate
  modified_base 7: mod_base = OTHER; note = 2'-O-methyluridine-3'-phosphate
  modified_base 8: mod_base = OTHER; note = 2'-deoxy-2'-fluoroguanosine-3'-phosphate
  modified_base 9: mod_base = OTHER; note = 2'-deoxy-2'-fluoroguanosine-3'-phosphate
  modified_base 10: mod_base = OTHER; note = 2'-O-methylguanosine-3'-phosphate
  modified_base 11: mod_base = OTHER; note = 2'-O-methyladenosine-3'-phosphate
  modified_base 12: mod_base = OTHER; note = 2'-O-methylguanosine-3'-phosphate
  modified_base 13: mod_base = OTHER; note = 2'-O-methylguanosine-3'-phosphate
  modified_base 14: mod_base = OTHER; note = 2'-deoxy-2'-fluoroadenosine-3'-phosphate
  modified_base 15: mod_base = OTHER; note = 2'-O-methyluridine-3'-phosphate
  modified_base 16: mod_base = OTHER; note = 2'-deoxy-2'-fluorouridine-3'-phosphate
  modified_base 17: mod_base = OTHER; note = 2'-O-methyluridine-3'-phosphate
  modified_base 18: mod_base = OTHER; note = 2'-O-methylguanosine-3'-phosphate
  modified_base 19: mod_base = OTHER; note = 2'-O-methyluridine-3'-phosphate
  modified_base 20: mod_base = OTHER; note = 2'-O-methyluridine-3'-phosphate
  modified_base 21: mod_base = OTHER; note = 2'-O-methyluridine-3'-phosphorothioate
  modified_base 22: mod_base = OTHER; note = 2'-O-methylcytidine-3'-phosphorothioate
  modified_base 23: mod_base = OTHER; note = 2'-O-methyluridine
tcatgatgggaggatttgtttct

SEQ ID NO: 1556 - RNA, 23 nt, synthetic construct
  source 1..23: mol_type = other RNA
  modified_base 1: mod_base = OTHER; note = 2'-O-methyluridine-3'-phosphorothioate 5'-(E)-Vinylphosphonate
  modified_base 2: mod_base = OTHER; note = 2'-deoxy-2'-fluorouridine-3'-phosphorothioate
  modified_base 3: mod_base = OTHER; note = 2'-O-methyluridine-3'-phosphate
  modified_base 4: mod_base = OTHER; note = 2'-O-methylguanosine-3'-phosphate
  modified_base 5: mod_base = OTHER; note = 2'-O-methyluridine-3'-phosphate
  modified_base 6: mod_base = OTHER; note = 2'-deoxy-2'-fluorouridine-3'-phosphate
  modified_base 7: mod_base = OTHER; note = 2'-O-methyluridine-3'-phosphate
  modified_base 8: mod_base = OTHER; note = 2'-deoxy-2'-fluorocytidine-3'-phosphate
  modified_base 9: mod_base = OTHER; note = 2'-deoxy-2'-fluoroadenosine-3'-phosphate
  modified_base 10: mod_base = OTHER; note = 2'-O-methyluridine-3'-phosphate
  modified_base 11: mod_base = OTHER; note = 2'-O-methylguanosine-3'-phosphate
  modified_base 12: mod_base = OTHER; note = 2'-O-methyladenosine-3'-phosphate
  modified_base 13: mod_base = OTHER; note = 2'-O-methyluridine-3'-phosphate
  modified_base 14: mod_base = OTHER; note = 2'-deoxy-2'-fluoroguanosine-3'-phosphate
  modified_base 15: mod_base = OTHER; note = 2'-O-methylguanosine-3'-phosphate
  modified_base 16: mod_base = OTHER; note = 2'-deoxy-2'-fluoroguanosine-3'-phosphate
  modified_base 17: mod_base = OTHER; note = 2'-O-methyladenosine-3'-phosphate
  modified_base 18: mod_base = OTHER; note = 2'-O-methylguanosine-3'-phosphate
  modified_base 19: mod_base = OTHER; note = 2'-O-methylguanosine-3'-phosphate
  modified_base 20: mod_base = OTHER; note = 2'-O-methyladenosine-3'-phosphate
  modified_base 21: mod_base = OTHER; note = 2'-O-methyluridine-3'-phosphorothioate
  modified_base 22: mod_base = OTHER; note = 2'-O-methyluridine-3'-phosphorothioate
  modified_base 23: mod_base = OTHER; note = 2'-O-methyluridine
tttgtttcatgatgggaggattt

SEQ ID NO: 1557 - RNA, 23 nt, synthetic construct
  source 1..23: mol_type = other RNA
  modified_base 1: mod_base = OTHER; note = 2'-O-methyluridine-3'-phosphorothioate 5'-(E)-Vinylphosphonate
  modified_base 2: mod_base = OTHER; note = 2'-deoxy-2'-fluoroadenosine-3'-phosphorothioate
  modified_base 3: mod_base = OTHER; note = 2'-O-methylguanosine-3'-phosphate
  modified_base 4: mod_base = OTHER; note = 2'-O-methyladenosine-3'-phosphate
  modified_base 5: mod_base = OTHER; note = 2'-O-methylguanosine-3'-phosphate
  modified_base 6: mod_base = OTHER; note = 2'-deoxy-2'-fluorouridine-3'-phosphate
  modified_base 7: mod_base = OTHER; note = 2'-O-methyluridine-3'-phosphate
  modified_base 8: mod_base = OTHER; note = 2'-deoxy-2'-fluorouridine-3'-phosphate
  modified_base 9: mod_base = OTHER; note = 2'-deoxy-2'-fluoroguanosine-3'-phosphate
  modified_base 10: mod_base = OTHER; note = 2'-O-methyluridine-3'-phosphate
  modified_base 11: mod_base = OTHER; note = 2'-O-methyluridine-3'-phosphate
  modified_base 12: mod_base = OTHER; note = 2'-O-methyluridine-3'-phosphate
  modified_base 13: mod_base = OTHER; note = 2'-O-methylcytidine-3'-phosphate
  modified_base 14: mod_base = OTHER; note = 2'-deoxy-2'-fluoroadenosine-3'-phosphate
  modified_base 15: mod_base = OTHER; note = 2'-O-methyluridine-3'-phosphate
  modified_base 16: mod_base = OTHER; note = 2'-deoxy-2'-fluoroguanosine-3'-phosphate
  modified_base 17: mod_base = OTHER; note = 2'-O-methyladenosine-3'-phosphate
  modified_base 18: mod_base = OTHER; note = 2'-O-methyluridine-3'-phosphate
  modified_base 19: mod_base = OTHER; note = 2'-O-methylguanosine-3'-phosphate
  modified_base 20: mod_base = OTHER; note = 2'-O-methylguanosine-3'-phosphate
  modified_base 21: mod_base = OTHER; note = 2'-O-methylguanosine-3'-phosphorothioate
  modified_base 22: mod_base = OTHER; note = 2'-O-methyladenosine-3'-phosphorothioate
  modified_base 23: mod_base = OTHER; note = 2'-O-methylguanosine
tagagtttgtttcatgatgggag

SEQ ID NO: 1558 - RNA, 23 nt, synthetic construct
  source 1..23: mol_type = other RNA
  modified_base 1: mod_base = OTHER; note = 2'-O-methyluridine-3'-phosphorothioate 5'-(E)-Vinylphosphonate
  modified_base 2: mod_base = OTHER; note = 2'-deoxy-2'-fluoroguanosine-3'-phosphorothioate
  modified_base 3: mod_base = OTHER; note = 2'-O-methyluridine-3'-phosphate
  modified_base 4: mod_base = OTHER; note = 2'-O-methyladenosine-3'-phosphate
  modified_base 5: mod_base = OTHER; note = 2'-O-methylguanosine-3'-phosphate
  modified_base 6: mod_base = OTHER; note = 2'-deoxy-2'-fluoroguanosine-3'-phosphate
  modified_base 7: mod_base = OTHER; note = 2'-O-methylcytidine-3'-phosphate
  modified_base 8: mod_base = OTHER; note = 2'-deoxy-2'-fluoroadenosine-3'-phosphate
  modified_base 9: mod_base = OTHER; note = 2'-deoxy-2'-fluoroguanosine-3'-phosphate
  modified_base 10: mod_base = OTHER; note = 2'-O-methyladenosine-3'-phosphate
  modified_base 11: mod_base = OTHER; note = 2'-O-methylguanosine-3'-phosphate
  modified_base 12: mod_base = OTHER; note = 2'-O-methyluridine-3'-phosphate
  modified_base 13: mod_base = OTHER; note = 2'-O-methyluridine-3'-phosphate
  modified_base 14: mod_base = OTHER; note = 2'-deoxy-2'-fluorouridine-3'-phosphate
  modified_base 15: mod_base = OTHER; note = 2'-O-methylguanosine-3'-phosphate
  modified_base 16: mod_base = OTHER; note = 2'-deoxy-2'-fluorouridine-3'-phosphate
  modified_base 17: mod_base = OTHER; note = 2'-O-methyluridine-3'-phosphate
  modified_base 18: mod_base = OTHER; note = 2'-O-methyluridine-3'-phosphate
  modified_base 19: mod_base = OTHER; note = 2'-O-methylcytidine-3'-phosphate
  modified_base 20: mod_base = OTHER; note = 2'-O-methyladenosine-3'-phosphate
  modified_base 21: mod_base = OTHER; note = 2'-O-methyluridine-3'-phosphorothioate
  modified_base 22: mod_base = OTHER; note = 2'-O-methylguanosine-3'-phosphorothioate
  modified_base 23: mod_base = OTHER; note = 2'-O-methyladenosine
tgtaggcagagtttgtttcatga

SEQ ID NO: 1559 - RNA, 23 nt, synthetic construct
  source 1..23: mol_type = other RNA
  modified_base 1: mod_base = OTHER; note = 2'-O-methyluridine-3'-phosphorothioate 5'-(E)-Vinylphosphonate
  modified_base 2: mod_base = OTHER; note = 2'-deoxy-2'-fluoroadenosine-3'-phosphorothioate
  modified_base 3: mod_base = OTHER; note = 2'-O-methylguanosine-3'-phosphate
  modified_base 4: mod_base = OTHER; note = 2'-O-methyladenosine-3'-phosphate
  modified_base 5: mod_base = OTHER; note = 2'-O-methyluridine-3'-phosphate
  modified_base 6: mod_base = OTHER; note = 2'-deoxy-2'-fluoroadenosine-3'-phosphate
  modified_base 7: mod_base = OTHER; note = 2'-O-methyladenosine-3'-phosphate
  modified_base 8: mod_base = OTHER; note = 2'-deoxy-2'-fluorocytidine-3'-phosphate
  modified_base 9: mod_base = OTHER; note = 2'-deoxy-2'-fluoroadenosine-3'-phosphate
  modified_base 10: mod_base = OTHER; note = 2'-O-methyluridine-3'-phosphate
  modified_base 11: mod_base = OTHER; note = 2'-O-methylguanosine-3'-phosphate
  modified_base 12: mod_base = OTHER; note = 2'-O-methyluridine-3'-phosphate
  modified_base 13: mod_base = OTHER; note = 2'-O-methyladenosine-3'-phosphate
  modified_base 14: mod_base = OTHER; note = 2'-deoxy-2'-fluoroguanosine-3'-phosphate
  modified_base 15: mod_base = OTHER; note = 2'-O-methylguanosine-3'-phosphate
  modified_base 16: mod_base = OTHER; note = 2'-deoxy-2'-fluorocytidine-3'-phosphate
  modified_base 17: mod_base = OTHER; note = 2'-O-methyladenosine-3'-phosphate
  modified_base 18: mod_base = OTHER; note = 2'-O-methylguanosine-3'-phosphate
  modified_base 19: mod_base = OTHER; note = 2'-O-methyladenosine-3'-phosphate
  modified_base 20: mod_base = OTHER; note = 2'-O-methylguanosine-3'-phosphate
  modified_base 21: mod_base = OTHER; note = 2'-O-methyluridine-3'-phosphorothioate
  modified_base 22: mod_base = OTHER; note = 2'-O-methyluridine-3'-phosphorothioate
  modified_base 23: mod_base = OTHER; note = 2'-O-methyluridine
tagataacatgtaggcagagttt

SEQ ID NO: 1560 - RNA, 23 nt, synthetic construct
  source 1..23: mol_type = other RNA
  modified_base 1: mod_base = OTHER; note = 2'-O-methyluridine-3'-phosphorothioate 5'-(E)-Vinylphosphonate
  modified_base 2: mod_base = OTHER; note = 2'-deoxy-2'-fluorouridine-3'-phosphorothioate
  modified_base 3: mod_base = OTHER; note = 2'-O-methyluridine-3'-phosphate
  modified_base 4: mod_base = OTHER; note = 2'-O-methyluridine-3'-phosphate
  modified_base 5: mod_base = OTHER; note = 2'-O-methylguanosine-3'-phosphate
  modified_base 6: mod_base = OTHER; note = 2'-deoxy-2'-fluoroguanosine-3'-phosphate
  modified_base 7: mod_base = OTHER; note = 2'-O-methyladenosine-3'-phosphate
  modified_base 8: mod_base = OTHER; note = 2'-deoxy-2'-fluoroguanosine-3'-phosphate
  modified_base 9: mod_base = OTHER; note = 2'-deoxy-2'-fluoroadenosine-3'-phosphate
  modified_base 10: mod_base = OTHER; note = 2'-O-methyluridine-3'-phosphate
  modified_base 11: mod_base = OTHER; note = 2'-O-methyladenosine-3'-phosphate
  modified_base 12: mod_base = OTHER; note = 2'-O-methyladenosine-3'-phosphate
  modified_base 13: mod_base = OTHER; note = 2'-O-methylcytidine-3'-phosphate
  modified_base 14: mod_base = OTHER; note = 2'-deoxy-2'-fluoroadenosine-3'-phosphate
  modified_base 15: mod_base = OTHER; note = 2'-O-methyluridine-3'-phosphate
  modified_base 16: mod_base = OTHER; note = 2'-deoxy-2'-fluoroguanosine-3'-phosphate
  modified_base 17: mod_base = OTHER; note = 2'-O-methyluridine-3'-phosphate
  modified_base 18: mod_base = OTHER; note = 2'-O-methyladenosine-3'-phosphate
  modified_base 19: mod_base = OTHER; note = 2'-O-methylguanosine-3'-phosphate
  modified_base 20: mod_base = OTHER; note = 2'-O-methylguanosine-3'-phosphate
  modified_base 21: mod_base = OTHER; note = 2'-O-methylcytidine-3'-phosphorothioate
  modified_base 22: mod_base = OTHER; note = 2'-O-methyladenosine-3'-phosphorothioate
  modified_base 23: mod_base = OTHER; note = 2'-O-methylguanosine
ttttggagataacatgtaggcag

SEQ ID NO: 1561 - RNA, 23 nt, synthetic construct
  source 1..23: mol_type = other RNA
  modified_base 1: mod_base = OTHER; note = 2'-O-methyluridine-3'-phosphorothioate 5'-(E)-Vinylphosphonate
  modified_base 2: mod_base = OTHER; note = 2'-deoxy-2'-fluoroguanosine-3'-phosphorothioate
  modified_base 3: mod_base = OTHER; note = 2'-O-methyluridine-3'-phosphate
  modified_base 4: mod_base = OTHER; note = 2'-O-methylguanosine-3'-phosphate
  modified_base 5: mod_base = OTHER; note = 2'-O-methylguanosine-3'-phosphate
  modified_base 6: mod_base = OTHER; note = 2'-deoxy-2'-fluorocytidine-3'-phosphate
  modified_base 7: mod_base = OTHER; note = 2'-O-methyluridine-3'-phosphate
  modified_base 8: mod_base = OTHER; note = 2'-deoxy-2'-fluorouridine-3'-phosphate
  modified_base 9: mod_base = OTHER; note = 2'-deoxy-2'-fluorouridine-3'-phosphate
  modified_base 10: mod_base = OTHER; note = 2'-O-methylguanosine-3'-phosphate
  modified_base 11: mod_base = OTHER; note = 2'-O-methylguanosine-3'-phosphate
  modified_base 12: mod_base = OTHER; note = 2'-O-methyladenosine-3'-phosphate
  modified_base 13: mod_base = OTHER; note = 2'-O-methylguanosine-3'-phosphate
  modified_base 14: mod_base = OTHER; note = 2'-deoxy-2'-fluoroadenosine-3'-phosphate
  modified_base 15: mod_base = OTHER; note = 2'-O-methyluridine-3'-phosphate
  modified_base 16: mod_base = OTHER; note = 2'-deoxy-2'-fluoroadenosine-3'-phosphate
  modified_base 17: mod_base = OTHER; note = 2'-O-methyladenosine-3'-phosphate
  modified_base 18: mod_base = OTHER; note = 2'-O-methylcytidine-3'-phosphate
  modified_base 19: mod_base = OTHER; note = 2'-O-methyladenosine-3'-phosphate
  modified_base 20: mod_base = OTHER; note = 2'-O-methyluridine-3'-phosphate
  modified_base 21: mod_base = OTHER; note = 2'-O-methylguanosine-3'-phosphorothioate
  modified_base 22: mod_base = OTHER; note = 2'-O-methyluridine-3'-phosphorothioate
  modified_base 23: mod_base = OTHER; note = 2'-O-methyladenosine
tgtggctttggagataacatgta

SEQ ID NO: 1562 - RNA, 23 nt, synthetic construct
  source 1..23: mol_type = other RNA
  modified_base 1: mod_base = OTHER; note = 2'-O-methyluridine-3'-phosphorothioate 5'-(E)-Vinylphosphonate
  modified_base 2: mod_base = OTHER; note = 2'-deoxy-2'-fluoroadenosine-3'-phosphorothioate
  modified_base 3: mod_base = OTHER; note = 2'-O-methyluridine-3'-phosphate
  modified_base 4: mod_base = OTHER; note = 2'-O-methyluridine-3'-phosphate
  modified_base 5: mod_base = OTHER; note = 2'-O-methyluridine-3'-phosphate
  modified_base 6: mod_base = OTHER; note = 2'-deoxy-2'-fluorocytidine-3'-phosphate
  modified_base 7: mod_base = OTHER; note = 2'-O-methyluridine-3'-phosphate
  modified_base 8: mod_base = OTHER; note = 2'-deoxy-2'-fluorouridine-3'-phosphate
  modified_base 9: mod_base = OTHER; note = 2'-deoxy-2'-fluorocytidine-3'-phosphate
  modified_base 10: mod_base = OTHER; note = 2'-O-methyluridine-3'-phosphate
  modified_base 11: mod_base = OTHER; note = 2'-O-methylguanosine-3'-phosphate
  modified_base 12: mod_base = OTHER; note = 2'-O-methyluridine-3'-phosphate
  modified_base 13: mod_base = OTHER; note = 2'-O-methylguanosine-3'-phosphate
  modified_base 14: mod_base = OTHER; note = 2'-deoxy-2'-fluoroguanosine-3'-phosphate
  modified_base 15: mod_base = OTHER; note = 2'-O-methylcytidine-3'-phosphate
  modified_base 16: mod_base = OTHER; note = 2'-deoxy-2'-fluorouridine-3'-phosphate
  modified_base 17: mod_base = OTHER; note = 2'-O-methyluridine-3'-phosphate
  modified_base 18: mod_base = OTHER; note = 2'-O-methyluridine-3'-phosphate
  modified_base 19: mod_base = OTHER; note = 2'-O-methylguanosine-3'-phosphate
  modified_base 20: mod_base = OTHER; note = 2'-O-methylguanosine-3'-phosphate
  modified_base 21: mod_base = OTHER; note = 2'-O-methyladenosine-3'-phosphorothioate
  modified_base 22: mod_base = OTHER; note = 2'-O-methylguanosine-3'-phosphorothioate
  modified_base 23: mod_base = OTHER; note = 2'-O-methyladenosine
tatttcttctgtggctttggaga

SEQ ID NO: 1563 - RNA, 23 nt, synthetic construct
  source 1..23: mol_type = other RNA
  modified_base 1: mod_base = OTHER; note = 2'-O-methyluridine-3'-phosphorothioate 5'-(E)-Vinylphosphonate
  modified_base 2: mod_base = OTHER; note = 2'-deoxy-2'-fluorocytidine-3'-phosphorothioate
  modified_base 3: mod_base = OTHER; note = 2'-O-methyladenosine-3'-phosphate
  modified_base 4: mod_base = OTHER; note = 2'-O-methylcytidine-3'-phosphate
  modified_base 5: mod_base = OTHER; note = 2'-O-methyladenosine-3'-phosphate
  modified_base 6: mod_base = OTHER; note = 2'-deoxy-2'-fluoroadenosine-3'-phosphate
  modified_base 7: mod_base = OTHER; note = 2'-O-methyladenosine-3'-phosphate
  modified_base 8: mod_base = OTHER; note = 2'-deoxy-2'-fluorouridine-3'-phosphate
  modified_base 9: mod_base = OTHER; note = 2'-deoxy-2'-fluorouridine-3'-phosphate
  modified_base 10: mod_base = OTHER; note = 2'-O-methyluridine-3'-phosphate
  modified_base 11: mod_base = OTHER; note = 2'-O-methylcytidine-3'-phosphate
  modified_base 12: mod_base = OTHER; note = 2'-O-methyluridine-3'-phosphate
  modified_base 13: mod_base = OTHER; note = 2'-O-methyluridine-3'-phosphate
  modified_base 14: mod_base = OTHER; note = 2'-deoxy-2'-fluorocytidine-3'-phosphate
  modified_base 15: mod_base = OTHER; note = 2'-O-methyluridine-3'-phosphate
  modified_base 16: mod_base = OTHER; note = 2'-deoxy-2'-fluoroguanosine-3'-phosphate
  modified_base 17: mod_base = OTHER; note = 2'-O-methyluridine-3'-phosphate
  modified_base 18: mod_base = OTHER; note = 2'-O-methylguanosine-3'-phosphate
  modified_base 19: mod_base = OTHER; note = 2'-O-methylguanosine-3'-phosphate
  modified_base 20: mod_base = OTHER; note = 2'-O-methylcytidine-3'-phosphate
  modified_base 21: mod_base = OTHER; note = 2'-O-methyluridine-3'-phosphorothioate
  modified_base 22: mod_base = OTHER; note = 2'-O-methyluridine-3'-phosphorothioate
  modified_base 23: mod_base = OTHER; note = 2'-O-methyluridine
tcacaaatttcttctgtggcttt

SEQ ID NO: 1564 - RNA, 23 nt, synthetic construct
  source 1..23: mol_type = other RNA
  modified_base 1: mod_base = OTHER; note = 2'-O-methyluridine-3'-phosphorothioate 5'-(E)-Vinylphosphonate
  modified_base 2: mod_base = OTHER; note = 2'-deoxy-2'-fluorouridine-3'-phosphorothioate
  modified_base 3: mod_base = OTHER; note = 2'-O-methylguanosine-3'-phosphate
  modified_base 4: mod_base = OTHER; note = 2'-O-methylguanosine-3'-phosphate
  modified_base 5: mod_base = OTHER; note = 2'-O-methyluridine-3'-phosphate
  modified_base 6: mod_base = OTHER; note = 2'-deoxy-2'-fluorocytidine-3'-phosphate
  modified_base 7: mod_base = OTHER; note = 2'-O-methylcytidine-3'-phosphate
  modified_base 8: mod_base = OTHER; note = 2'-deoxy-2'-fluoroadenosine-3'-phosphate
  modified_base 9: mod_base = OTHER; note = 2'-deoxy-2'-fluorocytidine-3'-phosphate
  modified_base 10: mod_base = OTHER; note = 2'-O-methyladenosine-3'-phosphate
  modified_base 11: mod_base = OTHER; note = 2'-O-methyladenosine-3'-phosphate
  modified_base 12: mod_base = OTHER; note = 2'-O-methyladenosine-3'-phosphate
  modified_base 13: mod_base = OTHER; note = 2'-O-methyluridine-3'-phosphate
  modified_base 14: mod_base = OTHER; note = 2'-deoxy-2'-fluorouridine-3'-phosphate
  modified_base 15: mod_base = OTHER; note = 2'-O-methyluridine-3'-phosphate
  modified_base 16: mod_base = OTHER; note = 2'-deoxy-2'-fluorocytidine-3'-phosphate
  modified_base 17: mod_base = OTHER; note = 2'-O-methyluridine-3'-phosphate
  modified_base 18: mod_base = OTHER; note = 2'-O-methyluridine-3'-phosphate
  modified_base 19: mod_base = OTHER; note = 2'-O-methylcytidine-3'-phosphate
  modified_base 20: mod_base = OTHER; note = 2'-O-methyluridine-3'-phosphate
  modified_base 21: mod_base = OTHER; note = 2'-O-methylguanosine-3'-phosphorothioate
  modified_base 22: mod_base = OTHER; note = 2'-O-methyluridine-3'-phosphorothioate
  modified_base 23: mod_base = OTHER; note = 2'-O-methylguanosine
ttggtccacaaatttcttctgtg

SEQ ID NO: 1565 - RNA, 23 nt, synthetic construct
  source 1..23: mol_type = other RNA
  modified_base 1: mod_base = OTHER; note = 2'-O-methyluridine-3'-phosphorothioate 5'-(E)-Vinylphosphonate
  modified_base 2: mod_base = OTHER; note = 2'-deoxy-2'-fluoroadenosine-3'-phosphorothioate
  modified_base 3: mod_base = OTHER; note = 2'-O-methyladenosine-3'-phosphate
  modified_base 4: mod_base = OTHER; note = 2'-O-methylguanosine-3'-phosphate
  modified_base 5: mod_base = OTHER; note = 2'-O-methylcytidine-3'-phosphate
  modified_base 6: mod_base = OTHER; note = 2'-deoxy-2'-fluorocytidine-3'-phosphate
  modified_base 7: mod_base = OTHER; note = 2'-O-methyluridine-3'-phosphate
  modified_base 8: mod_base = OTHER; note = 2'-deoxy-2'-fluoroguanosine-3'-phosphate
  modified_base 9: mod_base = OTHER; note = 2'-deoxy-2'-fluoroguanosine-3'-phosphate
  modified_base 10: mod_base = OTHER; note = 2'-O-methyluridine-3'-phosphate
  modified_base 11: mod_base = OTHER; note = 2'-O-methylcytidine-3'-phosphate
  modified_base 12: mod_base = OTHER; note = 2'-O-methylcytidine-3'-phosphate
  modified_base 13: mod_base = OTHER; note = 2'-O-methyladenosine-3'-phosphate
  modified_base 14: mod_base = OTHER; note = 2'-deoxy-2'-fluorocytidine-3'-phosphate
  modified_base 15: mod_base = OTHER; note = 2'-O-methyladenosine-3'-phosphate
  modified_base 16: mod_base = OTHER; note = 2'-deoxy-2'-fluoroadenosine-3'-phosphate
  modified_base 17: mod_base = OTHER; note = 2'-O-methyladenosine-3'-phosphate
  modified_base 18: mod_base = OTHER; note = 2'-O-methyluridine-3'-phosphate
  modified_base 19: mod_base = OTHER; note = 2'-O-methyluridine-3'-phosphate
  modified_base 20: mod_base = OTHER; note = 2'-O-methyluridine-3'-phosphate
  modified_base 21: mod_base = OTHER; note = 2'-O-methylcytidine-3'-phosphorothioate
  modified_base 22: mod_base = OTHER; note = 2'-O-methyluridine-3'-phosphorothioate
  modified_base 23: mod_base = OTHER; note = 2'-O-methyluridine
taagcctggtccacaaatttctt

SEQ ID NO: 1566 - RNA, 23 nt, synthetic construct
  source 1..23: mol_type = other RNA
  modified_base 1: mod_base = OTHER; note = 2'-O-methyluridine-3'-phosphorothioate 5'-(E)-Vinylphosphonate
  modified_base 2: mod_base = OTHER; note = 2'-deoxy-2'-fluoroadenosine-3'-phosphorothioate
  modified_base 3: mod_base = OTHER; note = 2'-O-methylcytidine-3'-phosphate
  modified_base 4: mod_base = OTHER; note = 2'-O-methyluridine-3'-phosphate
  modified_base 5: mod_base = OTHER; note = 2'-O-methyluridine-3'-phosphate
  modified_base 6: mod_base = OTHER; note = 2'-deoxy-2'-fluoroguanosine-3'-phosphate
  modified_base 7: mod_base = OTHER; note = 2'-O-methylguanosine-3'-phosphate
  modified_base 8: mod_base = OTHER; note = 2'-deoxy-2'-fluoroguanosine-3'-phosphate
  modified_base 9: mod_base = OTHER; note = 2'-deoxy-2'-fluorocytidine-3'-phosphate
  modified_base 10: mod_base = OTHER; note = 2'-O-methylcytidine-3'-phosphate
  modified_base 11: mod_base = OTHER; note = 2'-O-methyladenosine-3'-phosphate
  modified_base 12: mod_base = OTHER; note = 2'-O-methylcytidine-3'-phosphate
  modified_base 13: mod_base = OTHER; note = 2'-O-methyladenosine-3'-phosphate
  modified_base 14: mod_base = OTHER; note = 2'-deoxy-2'-fluoroadenosine-3'-phosphate
  modified_base 15: mod_base = OTHER; note = 2'-O-methylguanosine-3'-phosphate
  modified_base 16: mod_base = OTHER; note = 2'-deoxy-2'-fluorocytidine-3'-phosphate
  modified_base 17: mod_base = OTHER; note = 2'-O-methylcytidine-3'-phosphate
  modified_base 18: mod_base = OTHER; note = 2'-O-methyluridine-3'-phosphate
  modified_base 19: mod_base = OTHER; note = 2'-O-methylguanosine-3'-phosphate
  modified_base 20: mod_base = OTHER; note = 2'-O-methylguanosine-3'-phosphate
  modified_base 21: mod_base = OTHER; note = 2'-O-methyluridine-3'-phosphorothioate
  modified_base 22: mod_base = OTHER; note = 2'-O-methylcytidine-3'-phosphorothioate
  modified_base 23: mod_base = OTHER; note = 2'-O-methylcytidine
tacttgggccacaagcctggtcc

SEQ ID NO: 1567 - RNA, 23 nt, synthetic construct
  source 1..23: mol_type = other RNA
  modified_base 1: mod_base = OTHER; note = 2'-O-methyluridine-3'-phosphorothioate 5'-(E)-Vinylphosphonate
  modified_base 2: mod_base = OTHER; note = 2'-deoxy-2'-fluorouridine-3'-phosphorothioate
  modified_base 3: mod_base = OTHER; note = 2'-O-methyluridine-3'-phosphate
  modified_base 4: mod_base = OTHER; note = 2'-O-methyluridine-3'-phosphate
  modified_base 5: mod_base = OTHER; note = 2'-O-methylguanosine-3'-phosphate
  modified_base 6: mod_base = OTHER; note = 2'-deoxy-2'-fluoroadenosine-3'-phosphate
  modified_base 7: mod_base = OTHER; note = 2'-O-methyladenosine-3'-phosphate
  modified_base 8: mod_base = OTHER; note = 2'-deoxy-2'-fluorouridine-3'-phosphate
  modified_base 9: mod_base = OTHER; note = 2'-deoxy-2'-fluoroguanosine-3'-phosphate
  modified_base 10: mod_base = OTHER; note = 2'-O-methyladenosine-3'-phosphate
  modified_base 11: mod_base = OTHER; note = 2'-O-methylcytidine-3'-phosphate
  modified_base 12: mod_base = OTHER; note = 2'-O-methyluridine-3'-phosphate
  modified_base 13: mod_base = OTHER; note = 2'-O-methyluridine-3'-phosphate
  modified_base 14: mod_base = OTHER; note = 2'-deoxy-2'-fluoroguanosine-3'-phosphate
  modified_base 15: mod_base = OTHER; note = 2'-O-methylguanosine-3'-phosphate
  modified_base 16: mod_base = OTHER; note = 2'-deoxy-2'-fluoroguanosine-3'-phosphate
  modified_base 17: mod_base = OTHER; note = 2'-O-methylcytidine-3'-phosphate
  modified_base 18: mod_base = OTHER; note = 2'-O-methylcytidine-3'-phosphate
  modified_base 19: mod_base = OTHER; note = 2'-O-methyladenosine-3'-phosphate
  modified_base 20: mod_base = OTHER; note = 2'-O-methylcytidine-3'-phosphate
  modified_base 21: mod_base = OTHER; note = 2'-O-methyladenosine-3'-phosphorothioate
  modified_base 22: mod_base = OTHER; note = 2'-O-methyladenosine-3'-phosphorothioate
  modified_base 23: mod_base = OTHER; note = 2'-O-methylguanosine
ttttgaatgacttgggccacaag

SEQ ID NO: 1568 - RNA, 23 nt, synthetic construct
  source 1..23: mol_type = other RNA
  modified_base 1: mod_base = OTHER; note = 2'-O-methyluridine-3'-phosphorothioate 5'-(E)-Vinylphosphonate
  modified_base 2: mod_base = OTHER; note = 2'-deoxy-2'-fluorouridine-3'-phosphorothioate
  modified_base 3: mod_base = OTHER; note = 2'-O-methyluridine-3'-phosphate
  modified_base 4: mod_base = OTHER; note = 2'-O-methyluridine-3'-phosphate
  modified_base 5: mod_base = OTHER; note = 2'-O-methylcytidine-3'-phosphate
  modified_base 6: mod_base = OTHER; note = 2'-deoxy-2'-fluorouridine-3'-phosphate
  modified_base 7: mod_base = OTHER; note = 2'-O-methyluridine-3'-phosphate
  modified_base 8: mod_base = OTHER; note = 2'-deoxy-2'-fluorouridine-3'-phosphate
  modified_base 9: mod_base = OTHER; note = 2'-deoxy-2'-fluorouridine-3'-phosphate
  modified_base 10: mod_base = OTHER; note = 2'-O-methylguanosine-3'-phosphate
  modified_base 11: mod_base = OTHER; note = 2'-O-methyladenosine-3'-phosphate
  modified_base 12: mod_base = OTHER; note = 2'-O-methyladenosine-3'-phosphate
  modified_base 13: mod_base = OTHER; note = 2'-O-methyluridine-3'-phosphate
  modified_base 14: mod_base = OTHER; note = 2'-deoxy-2'-fluoroguanosine-3'-phosphate
  modified_base 15: mod_base = OTHER; note = 2'-O-methyladenosine-3'-phosphate
  modified_base 16: mod_base = OTHER; note = 2'-deoxy-2'-fluorocytidine-3'-phosphate
  modified_base 17: mod_base = OTHER; note = 2'-O-methyluridine-3'-phosphate
  modified_base 18: mod_base = OTHER; note = 2'-O-methyluridine-3'-phosphate
  modified_base 19: mod_base = OTHER; note = 2'-O-methylguanosine-3'-phosphate
  modified_base 20: mod_base = OTHER; note = 2'-O-methylguanosine-3'-phosphate
  modified_base 21: mod_base = OTHER; note = 2'-O-methylguanosine-3'-phosphorothioate
  modified_base 22: mod_base = OTHER; note = 2'-O-methylcytidine-3'-phosphorothioate
  modified_base 23: mod_base = OTHER; note = 2'-O-methylcytidine
ttttcttttgaatgacttgggcc

SEQ ID NO: 1569 - RNA, 23 nt, synthetic construct
  source 1..23: mol_type = other RNA
  modified_base 1: mod_base = OTHER; note = 2'-O-methyluridine-3'-phosphorothioate 5'-(E)-Vinylphosphonate
  modified_base 2: mod_base = OTHER; note = 2'-deoxy-2'-fluoroadenosine-3'-phosphorothioate
  modified_base 3: mod_base = OTHER; note = 2'-O-methylcytidine-3'-phosphate
  modified_base 4: mod_base = OTHER; note = 2'-O-methylcytidine-3'-phosphate
  modified_base 5: mod_base = OTHER; note = 2'-O-methyladenosine-3'-phosphate
  modified_base 6: mod_base = OTHER; note = 2'-deoxy-2'-fluorouridine-3'-phosphate
  modified_base 7: mod_base = OTHER; note = 2'-O-methyladenosine-3'-phosphate
  modified_base 8: mod_base = OTHER; note = 2'-deoxy-2'-fluorocytidine-3'-phosphate
  modified_base 9: mod_base = OTHER; note = 2'-deoxy-2'-fluorouridine-3'-phosphate
  modified_base 10: mod_base = OTHER; note = 2'-O-methyluridine-3'-phosphate
  modified_base 11: mod_base = OTHER; note = 2'-O-methyluridine-3'-phosphate
  modified_base 12: mod_base = OTHER; note = 2'-O-methylcytidine-3'-phosphate
  modified_base 13: mod_base = OTHER; note = 2'-O-methyluridine-3'-phosphate
  modified_base 14: mod_base = OTHER; note = 2'-deoxy-2'-fluorouridine-3'-phosphate
  modified_base 15: mod_base = OTHER; note = 2'-O-methyluridine-3'-phosphate
  modified_base 16: mod_base = OTHER; note = 2'-deoxy-2'-fluorouridine-3'-phosphate
  modified_base 17: mod_base = OTHER; note = 2'-O-methylguanosine-3'-phosphate
  modified_base 18: mod_base = OTHER; note = 2'-O-methyladenosine-3'-phosphate
  modified_base 19: mod_base = OTHER; note = 2'-O-methyladenosine-3'-phosphate
  modified_base 20: mod_base = OTHER; note = 2'-O-methyluridine-3'-phosphate
  modified_base 21: mod_base = OTHER; note = 2'-O-methylguanosine-3'-phosphorothioate
  modified_base 22: mod_base = OTHER; note = 2'-O-methyladenosine-3'-phosphorothioate
  modified_base 23: mod_base = OTHER; note = 2'-O-methylcytidine
taccatactttcttttgaatgac

SEQ ID NO: 1570 - RNA, 23 nt, synthetic construct
  source 1..23: mol_type = other RNA
  modified_base 1: mod_base = OTHER; note = 2'-O-methyluridine-3'-phosphorothioate 5'-(E)-Vinylphosphonate
  modified_base 2: mod_base = OTHER; note = 2'-deoxy-2'-fluoroguanosine-3'-phosphorothioate
  modified_base 3: mod_base = OTHER; note = 2'-O-methyladenosine-3'-phosphate
  modified_base 4: mod_base = OTHER; note = 2'-O-methylcytidine-3'-phosphate
  modified_base 5: mod_base = OTHER; note = 2'-O-methyluridine-3'-phosphate
  modified_base 6: mod_base = OTHER; note = 2'-deoxy-2'-fluorocytidine-3'-phosphate
  modified_base 7: mod_base = OTHER; note = 2'-O-methyladenosine-3'-phosphate
  modified_base 8: mod_base = OTHER; note = 2'-deoxy-2'-fluorocytidine-3'-phosphate
  modified_base 9: mod_base = OTHER; note = 2'-deoxy-2'-fluorocytidine-3'-phosphate
  modified_base 10: mod_base = OTHER; note = 2'-O-methyladenosine-3'-phosphate
  modified_base 11: mod_base = OTHER; note = 2'-O-methyluridine-3'-phosphate
  modified_base 12: mod_base = OTHER; note = 2'-O-methyladenosine-3'-phosphate
  modified_base 13: mod_base = OTHER; note = 2'-O-methylcytidine-3'-phosphate
  modified_base 14: mod_base = OTHER; note = 2'-deoxy-2'-fluorouridine-3'-phosphate
  modified_base 15: mod_base = OTHER; note = 2'-O-methyluridine-3'-phosphate
  modified_base 16: mod_base = OTHER; note = 2'-deoxy-2'-fluorouridine-3'-phosphate
  modified_base 17: mod_base = OTHER; note = 2'-O-methylcytidine-3'-phosphate
  modified_base 18: mod_base = OTHER; note = 2'-O-methyluridine-3'-phosphate
  modified_base 19: mod_base = OTHER; note = 2'-O-methyluridine-3'-phosphate
  modified_base 20: mod_base = OTHER; note = 2'-O-methyluridine-3'-phosphate
  modified_base 21: mod_base = OTHER; note = 2'-O-methyluridine-3'-phosphorothioate
  modified_base 22: mod_base = OTHER; note = 2'-O-methylguanosine-3'-phosphorothioate
  modified_base 23: mod_base = OTHER; note = 2'-O-methyladenosine
tgactcaccatactttcttttga

SEQ ID NO: 1571 - RNA, 23 nt, synthetic construct
  source 1..23: mol_type = other RNA
  modified_base 1: mod_base = OTHER; note = 2'-O-methyluridine-3'-phosphorothioate 5'-(E)-Vinylphosphonate
  modified_base 2: mod_base = OTHER; note = 2'-deoxy-2'-fluoroadenosine-3'-phosphorothioate
  modified_base 3: mod_base = OTHER; note = 2'-O-methyluridine-3'-phosphate
  modified_base 4: mod_base = OTHER; note = 2'-O-methylcytidine-3'-phosphate
  modified_base 5: mod_base = OTHER; note = 2'-O-methyluridine-3'-phosphate
  modified_base 6: mod_base = OTHER; note = 2'-deoxy-2'-fluorouridine-3'-phosphate
  modified_base 7: mod_base = OTHER; note = 2'-O-methylguanosine-3'-phosphate
  modified_base 8: mod_base = OTHER; note = 2'-deoxy-2'-fluoroguanosine-3'-phosphate
  modified_base 9: mod_base = OTHER; note = 2'-deoxy-2'-fluoroguanosine-3'-phosphate
  modified_base 10: mod_base = OTHER; note = 2'-O-methyladenosine-3'-phosphate
  modified_base 11: mod_base = OTHER; note = 2'-O-methylcytidine-3'-phosphate
  modified_base 12: mod_base = OTHER; note = 2'-O-methyluridine-3'-phosphate
  modified_base 13: mod_base = OTHER; note = 2'-O-methylcytidine-3'-phosphate
  modified_base 14: mod_base = OTHER; note = 2'-deoxy-2'-fluoroadenosine-3'-phosphate
  modified_base 15: mod_base = OTHER; note = 2'-O-methylcytidine-3'-phosphate
  modified_base 16: mod_base = OTHER; note = 2'-deoxy-2'-fluorocytidine-3'-phosphate
  modified_base 17: mod_base = OTHER; note = 2'-O-methyladenosine-3'-phosphate
  modified_base 18: mod_base = OTHER; note = 2'-O-methyluridine-3'-phosphate
  modified_base 19: mod_base = OTHER; note = 2'-O-methyladenosine-3'-phosphate
  modified_base 20: mod_base = OTHER; note = 2'-O-methylcytidine-3'-phosphate
  modified_base 21: mod_base = OTHER; note = 2'-O-methyluridine-3'-phosphorothioate
  modified_base 22: mod_base = OTHER; note = 2'-O-methyluridine-3'-phosphorothioate
  modified_base 23: mod_base = OTHER; note = 2'-O-methyluridine
tatcttgggactcaccatacttt

SEQ ID NO: 1572 - RNA, 23 nt, synthetic construct
  source 1..23: mol_type = other RNA
  modified_base 1: mod_base = OTHER; note = 2'-O-methyluridine-3'-phosphorothioate 5'-(E)-Vinylphosphonate
  modified_base 2: mod_base = OTHER; note = 2'-deoxy-2'-fluoroadenosine-3'-phosphorothioate
  modified_base 3: mod_base = OTHER; note = 2'-O-methylguanosine-3'-phosphate
  modified_base 4: mod_base = OTHER; note = 2'-O-methylcytidine-3'-phosphate
  modified_base 5: mod_base = OTHER; note = 2'-O-methyladenosine-3'-phosphate
  modified_base 6: mod_base = OTHER; note = 2'-deoxy-2'-fluoroguanosine-3'-phosphate
  modified_base 7: mod_base = OTHER; note = 2'-O-methyladenosine-3'-phosphate
  modified_base 8: mod_base = OTHER; note = 2'-deoxy-2'-fluoroguanosine-3'-phosphate
  modified_base 9: mod_base = OTHER; note = 2'-deoxy-2'-fluoroadenosine-3'-phosphate
  modified_base 10: mod_base = OTHER; note = 2'-O-methyluridine-3'-phosphate
  modified_base 11: mod_base = OTHER; note = 2'-O-methylcytidine-3'-phosphate
  modified_base 12: mod_base = OTHER; note = 2'-O-methyluridine-3'-phosphate
  modified_base 13: mod_base = OTHER; note = 2'-O-methyluridine-3'-phosphate
  modified_base 14: mod_base = OTHER; note = 2'-deoxy-2'-fluoroguanosine-3'-phosphate
  modified_base 15: mod_base = OTHER; note = 2'-O-methylguanosine-3'-phosphate
  modified_base 16: mod_base = OTHER; note = 2'-deoxy-2'-fluoroguanosine-3'-phosphate
  modified_base 17: mod_base = OTHER; note = 2'-O-methyladenosine-3'-phosphate
  modified_base 18: mod_base = OTHER; note = 2'-O-methylcytidine-3'-phosphate
  modified_base 19: mod_base = OTHER; note = 2'-O-methyluridine-3'-phosphate
  modified_base 20: mod_base = OTHER; note = 2'-O-methylcytidine-3'-phosphate
  modified_base 21: mod_base = OTHER; note = 2'-O-methyladenosine-3'-phosphorothioate
  modified_base 22: mod_base = OTHER; note = 2'-O-methylcytidine-3'-phosphorothioate
  modified_base 23: mod_base = OTHER; note = 2'-O-methylcytidine
tagcagagatcttgggactcacc

SEQ ID NO: 1573 - RNA, 23 nt, synthetic construct
  source 1..23: mol_type = other RNA
  modified_base 1: mod_base = OTHER; note = 2'-O-methyluridine-3'-phosphorothioate 5'-(E)-Vinylphosphonate
  modified_base 2: mod_base = OTHER; note = 2'-deoxy-2'-fluorouridine-3'-phosphorothioate
  modified_base 3: mod_base = OTHER; note = 2'-O-methylguanosine-3'-phosphate
  modified_base 4: mod_base = OTHER; note = 2'-O-methyluridine-3'-phosphate
  modified_base 5: mod_base = OTHER; note = 2'-O-methylcytidine-3'-phosphate
  modified_base 6: mod_base = OTHER; note = 2'-deoxy-2'-fluorocytidine-3'-phosphate
  modified_base 7: mod_base = OTHER; note = 2'-O-methyladenosine-3'-phosphate
  modified_base 8: mod_base = OTHER; note = 2'-deoxy-2'-fluoroguanosine-3'-phosphate
  modified_base 9: mod_base = OTHER; note = 2'-deoxy-2'-fluorocytidine-3'-phosphate
  modified_base 10: mod_base = OTHER; note = 2'-O-methyladenosine-3'-phosphate
  modified_base 11: mod_base = OTHER; note = 2'-O-methylguanosine-3'-phosphate
  modified_base 12: mod_base = OTHER; note = 2'-O-methyladenosine-3'-phosphate
  modified_base 13: mod_base = OTHER; note = 2'-O-methylguanosine-3'-phosphate
  modified_base 14: mod_base = OTHER; note = 2'-deoxy-2'-fluoroadenosine-3'-phosphate
  modified_base 15: mod_base = OTHER; note = 2'-O-methyluridine-3'-phosphate
  modified_base 16: mod_base = OTHER; note = 2'-deoxy-2'-fluorocytidine-3'-phosphate
  modified_base 17: mod_base = OTHER; note = 2'-O-methyluridine-3'-phosphate
  modified_base 18: mod_base = OTHER; note = 2'-O-methyluridine-3'-phosphate
  modified_base 19: mod_base = OTHER; note = 2'-O-methylguanosine-3'-phosphate
  modified_base 20: mod_base = OTHER; note = 2'-O-methylguanosine-3'-phosphate
  modified_base 21: mod_base = OTHER; note = 2'-O-methylguanosine-3'-phosphorothioate
  modified_base 22: mod_base = OTHER; note = 2'-O-methyladenosine-3'-phosphorothioate
  modified_base 23: mod_base = OTHER; note = 2'-O-methylcytidine
ttgtccagcagagatcttgggac

SEQ ID NO: 1574 - RNA, 23 nt, synthetic construct
  source 1..23: mol_type = other RNA
  modified_base 1: mod_base = OTHER; note = 2'-O-methyluridine-3'-phosphorothioate 5'-(E)-Vinylphosphonate
  modified_base 2: mod_base = OTHER; note = 2'-deoxy-2'-fluoroguanosine-3'-phosphorothioate
  modified_base 3: mod_base = OTHER; note = 2'-O-methyluridine-3'-phosphate
  modified_base 4: mod_base = OTHER; note = 2'-O-methyluridine-3'-phosphate
  modified_base 5: mod_base = OTHER; note = 2'-O-methylguanosine-3'-phosphate
  modified_base 6: mod_base = OTHER; note = 2'-deoxy-2'-fluoroadenosine-3'-phosphate
  modified_base 7: mod_base = OTHER; note = 2'-O-methyluridine-3'-phosphate
  modified_base 8: mod_base = OTHER; note = 2'-deoxy-2'-fluoroguanosine-3'-phosphate
  modified_base 9: mod_base = OTHER; note = 2'-deoxy-2'-fluorouridine-3'-phosphate
  modified_base 10: mod_base = OTHER; note = 2'-O-methylcytidine-3'-phosphate
  modified_base 11: mod_base = OTHER; note = 2'-O-methylcytidine-3'-phosphate
  modified_base 12: mod_base = OTHER; note = 2'-O-methyladenosine-3'-phosphate
  modified_base 13: mod_base = OTHER; note = 2'-O-methylguanosine-3'-phosphate
  modified_base 14: mod_base = OTHER; note = 2'-deoxy-2'-fluorocytidine-3'-phosphate
  modified_base 15: mod_base = OTHER; note = 2'-O-methyladenosine-3'-phosphate
  modified_base 16: mod_base = OTHER; note = 2'-deoxy-2'-fluoroguanosine-3'-phosphate
  modified_base 17: mod_base = OTHER; note = 2'-O-methyladenosine-3'-phosphate
  modified_base 18: mod_base = OTHER; note = 2'-O-methylguanosine-3'-phosphate
  modified_base 19: mod_base = OTHER; note = 2'-O-methyladenosine-3'-phosphate
  modified_base 20: mod_base = OTHER; note = 2'-O-methyluridine-3'-phosphate
  modified_base 21: mod_base = OTHER; note = 2'-O-methylcytidine-3'-phosphorothioate
  modified_base 22: mod_base = OTHER; note = 2'-O-methyluridine-3'-phosphorothioate
  modified_base 23: mod_base = OTHER; note = 2'-O-methyluridine
tgttgatgtccagcagagatctt

SEQ ID NO: 1575 - RNA, 23 nt, synthetic construct
  source 1..23: mol_type = other RNA
  modified_base 1: mod_base = OTHER; note = 2'-O-methyluridine-3'-phosphorothioate 5'-(E)-Vinylphosphonate
  modified_base 2: mod_base = OTHER; note = 2'-deoxy-2'-fluoroadenosine-3'-phosphorothioate
  modified_base 3: mod_base = OTHER; note = 2'-O-methylcytidine-3'-phosphate
  modified_base 4: mod_base = OTHER; note = 2'-O-methyladenosine-3'-phosphate
  modified_base 5: mod_base = OTHER; note = 2'-O-methylguanosine-3'-phosphate
  modified_base 6: mod_base = OTHER; note = 2'-deoxy-2'-fluorouridine-3'-phosphate
  modified_base 7: mod_base = OTHER; note = 2'-O-methylguanosine-3'-phosphate
  modified_base 8: mod_base = OTHER; note = 2'-deoxy-2'-fluorouridine-3'-phosphate
  modified_base 9: mod_base = OTHER; note = 2'-deoxy-2'-fluorouridine-3'-phosphate
  modified_base 10: mod_base = OTHER; note = 2'-O-methylguanosine-3'-phosphate
  modified_base 11: mod_base = OTHER; note = 2'-O-methyladenosine-3'-phosphate
  modified_base 12: mod_base = OTHER; note = 2'-O-methyluridine-3'-phosphate
  modified_base 13: mod_base = OTHER; note = 2'-O-methylguanosine-3'-phosphate
  modified_base 14: mod_base = OTHER; note = 2'-deoxy-2'-fluorouridine-3'-phosphate
  modified_base 15: mod_base = OTHER; note = 2'-O-methylcytidine-3'-phosphate
  modified_base 16: mod_base = OTHER; note = 2'-deoxy-2'-fluorocytidine-3'-phosphate
  modified_base 17: mod_base = OTHER; note = 2'-O-methyladenosine-3'-phosphate
  modified_base 18: mod_base = OTHER; note = 2'-O-methylguanosine-3'-phosphate
  modified_base 19: mod_base = OTHER; note = 2'-O-methylcytidine-3'-phosphate
  modified_base 20: mod_base = OTHER; note = 2'-O-methyladenosine-3'-phosphate
  modified_base 21: mod_base = OTHER; note = 2'-O-methylguanosine-3'-phosphorothioate
  modified_base 22: mod_base = OTHER; note = 2'-O-methyladenosine-3'-phosphorothioate
  modified_base 23: mod_base = OTHER; note = 2'-O-methylguanosine
tacagtgttgatgtccagcagag

SEQ ID NO: 1576 - RNA, 23 nt, synthetic construct
  source 1..23: mol_type = other RNA
  modified_base 1: mod_base = OTHER; note = 2'-O-methyluridine-3'-phosphorothioate 5'-(E)-Vinylphosphonate
  modified_base 2: mod_base = OTHER; note = 2'-deoxy-2'-fluorocytidine-3'-phosphorothioate
  modified_base 3: mod_base = OTHER; note = 2'-O-methyluridine-3'-phosphate
  modified_base 4: mod_base = OTHER; note = 2'-O-methylguanosine-3'-phosphate
  modified_base 5: mod_base = OTHER; note = 2'-O-methyladenosine-3'-phosphate
  modified_base 6: mod_base = OTHER; note = 2'-deoxy-2'-fluorocytidine-3'-phosphate
  modified_base 7: mod_base = OTHER; note = 2'-O-methylcytidine-3'-phosphate
  modified_base 8: mod_base = OTHER; note = 2'-deoxy-2'-fluoroadenosine-3'-phosphate
  modified_base 9: mod_base = OTHER; note = 2'-deoxy-2'-fluorocytidine-3'-phosphate
  modified_base 10: mod_base = OTHER; note = 2'-O-methyladenosine-3'-phosphate
  modified_base 11: mod_base = OTHER; note = 2'-O-methylguanosine-3'-phosphate
  modified_base 12: mod_base = OTHER; note = 2'-O-methyluridine-3'-phosphate
  modified_base 13: mod_base = OTHER; note = 2'-O-methylguanosine-3'-phosphate
  modified_base 14: mod_base = OTHER; note = 2'-deoxy-2'-fluorouridine-3'-phosphate
  modified_base 15: mod_base = OTHER; note = 2'-O-methyluridine-3'-phosphate
  modified_base 16: mod_base = OTHER; note = 2'-deoxy-2'-fluoroguanosine-3'-phosphate
  modified_base 17: mod_base = OTHER; note = 2'-O-methyladenosine-3'-phosphate
  modified_base 18: mod_base = OTHER; note = 2'-O-methyluridine-3'-phosphate
  modified_base 19: mod_base = OTHER; note = 2'-O-methylguanosine-3'-phosphate
  modified_base 20: mod_base = OTHER; note = 2'-O-methyluridine-3'-phosphate
  modified_base 21: mod_base = OTHER; note = 2'-O-methylcytidine-3'-phosphorothioate
  modified_base 22: mod_base = OTHER; note = 2'-O-methylcytidine-3'-phosphorothioate
  modified_base 23: mod_base = OTHER; note = 2'-O-methyladenosine
tctgaccacagtgttgatgtcca

SEQ ID NO: 1577 - RNA, 23 nt, synthetic construct
  source 1..23: mol_type = other RNA
  modified_base 1: mod_base = OTHER; note = 2'-O-methyluridine-3'-phosphorothioate 5'-(E)-Vinylphosphonate
  modified_base 2: mod_base = OTHER; note = 2'-deoxy-2'-fluoroadenosine-3'-phosphorothioate
  modified_base 3: mod_base = OTHER; note = 2'-O-methylguanosine-3'-phosphate
  modified_base 4: mod_base = OTHER; note = 2'-O-methylcytidine-3'-phosphate
  modified_base 5: mod_base = OTHER; note = 2'-O-methyluridine-3'-phosphate
  modified_base 6: mod_base = OTHER; note = 2'-deoxy-2'-fluoroguanosine-3'-phosphate
  modified_base 7: mod_base = OTHER; note = 2'-O-methylcytidine-3'-phosphate
  modified_base 8: mod_base = OTHER; note = 2'-deoxy-2'-fluorouridine-3'-phosphate
  modified_base 9: mod_base = OTHER; note = 2'-deoxy-2'-fluorocytidine-3'-phosphate
  modified_base 10: mod_base = OTHER; note = 2'-O-methyluridine-3'-phosphate
  modified_base 11: mod_base = OTHER; note = 2'-O-methylguanosine-3'-phosphate
  modified_base 12: mod_base = OTHER; note = 2'-O-methyladenosine-3'-phosphate
  modified_base 13: mod_base = OTHER; note = 2'-O-methylcytidine-3'-phosphate
  modified_base 14: mod_base = OTHER; note = 2'-deoxy-2'-fluorocytidine-3'-phosphate
  modified_base 15: mod_base = OTHER; note = 2'-O-methyladenosine-3'-phosphate
  modified_base 16: mod_base = OTHER; note = 2'-deoxy-2'-fluorocytidine-3'-phosphate
  modified_base 17: mod_base = OTHER; note = 2'-O-methyladenosine-3'-phosphate
  modified_base 18: mod_base = OTHER; note = 2'-O-methylguanosine-3'-phosphate
  modified_base 19: mod_base = OTHER; note = 2'-O-methyluridine-3'-phosphate
  modified_base 20: mod_base = OTHER; note = 2'-O-methylguanosine-3'-phosphate
  modified_base 21: mod_base = OTHER; note = 2'-O-methyluridine-3'-phosphorothioate
  modified_base 22: mod_base = OTHER; note = 2'-O-methyluridine-3'-phosphorothioate
  modified_base 23: mod_base = OTHER; note = 2'-O-methylguanosine
tagctgctctgaccacagtgttg

SEQ ID NO: 1578 - RNA, 23 nt, synthetic construct
  source 1..23: mol_type = other RNA
  modified_base 1: mod_base = OTHER; note = 2'-O-methyluridine-3'-phosphorothioate 5'-(E)-Vinylphosphonate
  modified_base 2: mod_base = OTHER; note = 2'-deoxy-2'-fluoroadenosine-3'-phosphorothioate
  modified_base 3: mod_base = OTHER; note = 2'-O-methyladenosine-3'-phosphate
  modified_base 4: mod_base = OTHER; note = 2'-O-methylguanosine-3'-phosphate
  modified_base 5: mod_base = OTHER; note = 2'-O-methylguanosine-3'-phosphate
  modified_base 6: mod_base = OTHER; note = 2'-deoxy-2'-fluorouridine-3'-phosphate
  modified_base 7: mod_base = OTHER; note = 2'-O-methyluridine-3'-phosphate
  modified_base 8: mod_base = OTHER; note = 2'-deoxy-2'-fluorocytidine-3'-phosphate
  modified_base 9: mod_base = OTHER; note = 2'-deoxy-2'-fluoroadenosine-3'-phosphate
  modified_base 10: mod_base = OTHER; note = 2'-O-methyladenosine-3'-phosphate
  modified_base 11: mod_base = OTHER; note = 2'-O-methyluridine-3'-phosphate
  modified_base 12: mod_base = OTHER; note = 2'-O-methylcytidine-3'-phosphate
  modified_base 13: mod_base = OTHER; note = 2'-O-methylcytidine-3'-phosphate
  modified_base 14: mod_base = OTHER; note = 2'-deoxy-2'-fluoroguanosine-3'-phosphate
  modified_base 15: mod_base = OTHER; note = 2'-O-methyladenosine-3'-phosphate
  modified_base 16: mod_base = OTHER; note = 2'-deoxy-2'-fluoroguanosine-3'-phosphate
  modified_base 17: mod_base = OTHER; note = 2'-O-methyluridine-3'-phosphate
  modified_base 18: mod_base = OTHER; note = 2'-O-methylguanosine-3'-phosphate
  modified_base 19: mod_base = OTHER; note = 2'-O-methyluridine-3'-phosphate
  modified_base 20: mod_base = OTHER; note = 2'-O-methyluridine-3'-phosphate
  modified_base 21: mod_base = OTHER; note = 2'-O-methylguanosine-3'-phosphorothioate
  modified_base 22: mod_base = OTHER; note = 2'-O-methyladenosine-3'-phosphorothioate
  modified_base 23: mod_base = OTHER; note = 2'-O-methyluridine
taaggttcaatccgagtgttgat

SEQ ID NO: 1579 - RNA, 23 nt, synthetic construct
  source 1..23: mol_type = other RNA
  modified_base 1: mod_base = OTHER; note = 2'-O-methyluridine-3'-phosphorothioate 5'-(E)-Vinylphosphonate
  modified_base 2: mod_base = OTHER; note = 2'-deoxy-2'-fluoroguanosine-3'-phosphorothioate
  modified_base 3: mod_base = OTHER; note = 2'-O-methyluridine-3'-phosphate
  modified_base 4: mod_base = OTHER; note = 2'-O-methyladenosine-3'-phosphate
  modified_base 5: mod_base = OTHER; note = 2'-O-methylguanosine-3'-phosphate
  modified_base 6: mod_base = OTHER; note = 2'-deoxy-2'-fluorouridine-3'-phosphate
  modified_base 7: mod_base = OTHER; note = 2'-O-methyladenosine-3'-phosphate
  modified_base 8: mod_base = OTHER; note = 2'-deoxy-2'-fluoroadenosine-3'-phosphate
  modified_base 9: mod_base = OTHER; note = 2'-deoxy-2'-fluoroguanosine-3'-phosphate
  modified_base 10: mod_base = OTHER; note = 2'-O-methylguanosine-3'-phosphate
  modified_base 11: mod_base = OTHER; note = 2'-O-methyluridine-3'-phosphate
  modified_base 12: mod_base = OTHER; note = 2'-O-methyluridine-3'-phosphate
  modified_base 13: mod_base = OTHER; note = 2'-O-methylcytidine-3'-phosphate
  modified_base 14: mod_base = OTHER; note = 2'-deoxy-2'-fluoroadenosine-3'-phosphate
  modified_base 15: mod_base = OTHER; note = 2'-O-methyladenosine-3'-phosphate
  modified_base 16: mod_base = OTHER; note = 2'-deoxy-2'-fluorouridine-3'-phosphate
  modified_base 17: mod_base = OTHER; note = 2'-O-methylcytidine-3'-phosphate
  modified_base 18: mod_base = OTHER; note = 2'-O-methylcytidine-3'-phosphate
  modified_base 19: mod_base = OTHER; note = 2'-O-methylguanosine-3'-phosphate
  modified_base 20: mod_base = OTHER; note = 2'-O-methyladenosine-3'-phosphate
  modified_base 21: mod_base = OTHER; note = 2'-O-methylguanosine-3'-phosphorothioate
  modified_base 22: mod_base = OTHER; note = 2'-O-methyluridine-3'-phosphorothioate
  modified_base 23: mod_base = OTHER; note = 2'-O-methylguanosine
tgtagtaaggttcaatccgagtg

SEQ ID NO: 1580 - RNA, 23 nt, synthetic construct
  source 1..23: mol_type = other RNA
  modified_base 1: mod_base = OTHER; note = 2'-O-methyluridine-3'-phosphorothioate 5'-(E)-Vinylphosphonate
  modified_base 2: mod_base = OTHER; note = 2'-deoxy-2'-fluoroguanosine-3'-phosphorothioate
  modified_base 3: mod_base = OTHER; note = 2'-O-methyladenosine-3'-phosphate
  modified_base 4: mod_base = OTHER; note = 2'-O-methyluridine-3'-phosphate
  modified_base 5: mod_base = OTHER; note = 2'-O-methylguanosine-3'-phosphate
  modified_base 6: mod_base = OTHER; note = 2'-deoxy-2'-fluorocytidine-3'-phosphate
  modified_base 7: mod_base = OTHER; note = 2'-O-methyluridine-3'-phosphate
  modified_base 8: mod_base = OTHER; note = 2'-deoxy-2'-fluoroguanosine-3'-phosphate
  modified_base 9: mod_base = OTHER; note = 2'-deoxy-2'-fluorouridine-3'-phosphate
  modified_base 10: mod_base = OTHER; note = 2'-O-methyladenosine-3'-phosphate
  modified_base 11: mod_base = OTHER; note = 2'-O-methylguanosine-3'-phosphate
  modified_base 12: mod_base = OTHER; note = 2'-O-methyluridine-3'-phosphate
  modified_base 13: mod_base = OTHER; note = 2'-O-methyladenosine-3'-phosphate
  modified_base 14: mod_base = OTHER; note = 2'-deoxy-2'-fluoroadenosine-3'-phosphate
  modified_base 15: mod_base = OTHER; note = 2'-O-methylguanosine-3'-phosphate
  modified_base 16: mod_base = OTHER; note = 2'-deoxy-2'-fluoroguanosine-3'-phosphate
  modified_base 17: mod_base = OTHER; note = 2'-O-methyluridine-3'-phosphate
  modified_base 18: mod_base = OTHER; note = 2'-O-methyluridine-3'-phosphate
  modified_base 19: mod_base = OTHER; note = 2'-O-methylcytidine-3'-phosphate
  modified_base 20: mod_base = OTHER; note = 2'-O-methyladenosine-3'-phosphate
  modified_base 21: mod_base = OTHER; note = 2'-O-methyladenosine-3'-phosphorothioate
  modified_base 22: mod_base = OTHER; note = 2'-O-methyluridine-3'-phosphorothioate
  modified_base 23: mod_base = OTHER; note = 2'-O-methylcytidine
tgatgctgtagtaaggttcaatc

SEQ ID NO: 1581 - RNA, 23 nt, synthetic construct
  source 1..23: mol_type = other RNA
  modified_base 1: mod_base = OTHER; note = 2'-O-methyluridine-3'-phosphorothioate 5'-(E)-Vinylphosphonate
  modified_base 2: mod_base = OTHER; note = 2'-deoxy-2'-fluorouridine-3'-phosphorothioate
  modified_base 3: mod_base = OTHER; note = 2'-O-methyluridine-3'-phosphate
  modified_base 4: mod_base = OTHER; note = 2'-O-methyladenosine-3'-phosphate
  modified_base 5: mod_base = OTHER; note = 2'-O-methyluridine-3'-phosphate
  modified_base 6: mod_base = OTHER; note = 2'-deoxy-2'-fluoroadenosine-3'-phosphate
  modified_base 7: mod_base = OTHER; note = 2'-O-methylguanosine-3'-phosphate
  modified_base 8: mod_base = OTHER; note = 2'-deoxy-2'-fluoroadenosine-3'-phosphate
  modified_base 9: mod_base = OTHER; note = 2'-deoxy-2'-fluorouridine-3'-phosphate
  modified_base 10: mod_base = OTHER; note = 2'-O-methylguanosine-3'-phosphate
  modified_base 11: mod_base = OTHER; note = 2'-O-methylcytidine-3'-phosphate
  modified_base 12: mod_base = OTHER; note = 2'-O-methyluridine-3'-phosphate
  modified_base 13: mod_base = OTHER; note = 2'-O-methylguanosine-3'-phosphate
  modified_base 14: mod_base = OTHER; note = 2'-deoxy-2'-fluorouridine-3'-phosphate
  modified_base 15: mod_base = OTHER; note = 2'-O-methyladenosine-3'-phosphate
  modified_base 16: mod_base = OTHER; note = 2'-deoxy-2'-fluoroguanosine-3'-phosphate
  modified_base 17: mod_base = OTHER; note = 2'-O-methyluridine-3'-phosphate
  modified_base 18: mod_base = OTHER; note = 2'-O-methyladenosine-3'-phosphate
  modified_base 19: mod_base = OTHER; note = 2'-O-methyladenosine-3'-phosphate
  modified_base 20: mod_base = OTHER; note = 2'-O-methylguanosine-3'-phosphate
  modified_base 21: mod_base = OTHER; note = 2'-O-methylguanosine-3'-phosphorothioate
  modified_base 22: mod_base = OTHER; note = 2'-O-methyluridine-3'-phosphorothioate
  modified_base 23: mod_base = OTHER; note = 2'-O-methyluridine
tttatagatgctgtagtaaggtt

SEQ ID NO: 1582 - RNA, 23 nt, synthetic construct
  source 1..23: mol_type = other RNA
  modified_base 1: mod_base = OTHER; note = 2'-O-methyluridine-3'-phosphorothioate 5'-(E)-Vinylphosphonate
  modified_base 2: mod_base = OTHER; note = 2'-deoxy-2'-fluorouridine-3'-phosphorothioate
  modified_base 3: mod_base = OTHER; note = 2'-O-methylguanosine-3'-phosphate
  modified_base 4: mod_base = OTHER; note = 2'-O-methylcytidine-3'-phosphate
  modified_base 5: mod_base = OTHER; note = 2'-O-methyluridine-3'-phosphate
  modified_base 6: mod_base = OTHER; note = 2'-deoxy-2'-fluoroguanosine-3'-phosphate
  modified_base 7: mod_base = OTHER; note = 2'-O-methyluridine-3'-phosphate
  modified_base 8: mod_base = OTHER; note = 2'-deoxy-2'-fluorouridine-3'-phosphate
  modified_base 9: mod_base = OTHER; note = 2'-deoxy-2'-fluoroadenosine-3'-phosphate
  modified_base 10: mod_base = OTHER; note = 2'-O-methyluridine-3'-phosphate
  modified_base 11: mod_base = OTHER; note = 2'-O-methyladenosine-3'-phosphate
  modified_base 12: mod_base = OTHER; note = 2'-O-methylguanosine-3'-phosphate
  modified_base 13: mod_base = OTHER; note = 2'-O-methyladenosine-3'-phosphate
  modified_base 14: mod_base = OTHER; note = 2'-deoxy-2'-fluorouridine-3'-phosphate
  modified_base 15: mod_base = OTHER; note = 2'-O-methylguanosine-3'-phosphate
  modified_base 16: mod_base = OTHER; note = 2'-deoxy-2'-fluorocytidine-3'-phosphate
  modified_base 17: mod_base = OTHER; note = 2'-O-methyluridine-3'-phosphate
  modified_base 18: mod_base = OTHER; note = 2'-O-methylguanosine-3'-phosphate
  modified_base 19: mod_base = OTHER; note = 2'-O-methyluridine-3'-phosphate
  modified_base 20: mod_base = OTHER; note = 2'-O-methyladenosine-3'-phosphate
  modified_base 21: mod_base = OTHER; note = 2'-O-methylguanosine-3'-phosphorothioate
  modified_base 22: mod_base = OTHER; note = 2'-O-methyluridine-3'-phosphorothioate
  modified_base 23: mod_base = OTHER; note = 2'-O-methyladenosine
ttgctgttatagatgctgtagta

SEQ ID NO: 1583 - RNA, 23 nt, synthetic construct
  source 1..23: mol_type = other RNA
  modified_base 1: mod_base = OTHER; note = 2'-O-methyluridine-3'-phosphorothioate 5'-(E)-Vinylphosphonate
  modified_base 2: mod_base = OTHER; note = 2'-deoxy-2'-fluoroadenosine-3'-phosphorothioate
  modified_base 3: mod_base = OTHER; note = 2'-O-methyladenosine-3'-phosphate
  modified_base 4: mod_base = OTHER; note = 2'-O-methylguanosine-3'-phosphate
  modified_base 5: mod_base = OTHER; note = 2'-O-methylguanosine-3'-phosphate
  modified_base 6: mod_base = OTHER; note = 2'-deoxy-2'-fluoroguanosine-3'-phosphate
  modified_base 7: mod_base = OTHER; note = 2'-O-methylcytidine-3'-phosphate
  modified_base 8: mod_base = OTHER; note = 2'-deoxy-2'-fluorouridine-3'-phosphate
  modified_base 9: mod_base = OTHER; note = 2'-deoxy-2'-fluoroguanosine-3'-phosphate
  modified_base 10: mod_base = OTHER; note = 2'-O-methylcytidine-3'-phosphate
  modified_base 11: mod_base = OTHER; note = 2'-O-methyluridine-3'-phosphate
  modified_base 12: mod_base = OTHER; note = 2'-O-methylguanosine-3'-phosphate
  modified_base 13: mod_base = OTHER; note = 2'-O-methyluridine-3'-phosphate
  modified_base 14: mod_base = OTHER; note = 2'-deoxy-2'-fluorouridine-3'-phosphate
  modified_base 15: mod_base = OTHER; note = 2'-O-methyladenosine-3'-phosphate
  modified_base 16: mod_base = OTHER; note = 2'-deoxy-2'-fluorouridine-3'-phosphate
  modified_base 17: mod_base = OTHER; note = 2'-O-methyladenosine-3'-phosphate
  modified_base 18: mod_base = OTHER; note = 2'-O-methylguanosine-3'-phosphate
  modified_base 19: mod_base = OTHER; note = 2'-O-methyladenosine-3'-phosphate
  modified_base 20: mod_base = OTHER; note = 2'-O-methyluridine-3'-phosphate
  modified_base 21: mod_base = OTHER; note = 2'-O-methylguanosine-3'-phosphorothioate
  modified_base 22: mod_base = OTHER; note = 2'-O-methylcytidine-3'-phosphorothioate
  modified_base 23: mod_base = OTHER; note = 2'-O-methyluridine
taagggctgctgttatagatgct

SEQ ID NO: 1584 - RNA, 23 nt, synthetic construct
  source 1..23: mol_type = other RNA
  modified_base 1: mod_base = OTHER; note = 2'-O-methyluridine-3'-phosphorothioate 5'-(E)-Vinylphosphonate
  modified_base 2: mod_base = OTHER; note = 2'-deoxy-2'-fluoroadenosine-3'-phosphorothioate
  modified_base 3: mod_base = OTHER; note = 2'-O-methyladenosine-3'-phosphate
  modified_base 4: mod_base = OTHER; note = 2'-O-methylguanosine-3'-phosphate
  modified_base 5: mod_base = OTHER; note = 2'-O-methyluridine-3'-phosphate
  modified_base 6: mod_base = OTHER; note = 2'-deoxy-2'-fluorouridine-3'-phosphate
  modified_base 7: mod_base = OTHER; note = 2'-O-methyladenosine-3'-phosphate
  modified_base 8: mod_base = OTHER; note = 2'-deoxy-2'-fluorocytidine-3'-phosphate
  modified_base 9: mod_base = OTHER; note = 2'-deoxy-2'-fluoroadenosine-3'-phosphate
  modified_base 10: mod_base = OTHER; note = 2'-O-methyluridine-3'-phosphate
  modified_base 11: mod_base = OTHER; note = 2'-O-methylguanosine-3'-phosphate
  modified_base 12: mod_base = OTHER; note = 2'-O-methylguanosine-3'-phosphate
  modified_base 13: mod_base = OTHER; note = 2'-O-methylguanosine-3'-phosphate
  modified_base 14: mod_base = OTHER; note = 2'-deoxy-2'-fluorocytidine-3'-phosphate
  modified_base 15: mod_base = OTHER; note = 2'-O-methyluridine-3'-phosphate
  modified_base 16: mod_base = OTHER; note = 2'-deoxy-2'-fluoroguanosine-3'-phosphate
  modified_base 17: mod_base = OTHER; note = 2'-O-methylcytidine-3'-phosphate
  modified_base 18: mod_base = OTHER; note = 2'-O-methyluridine-3'-phosphate
  modified_base 19: mod_base = OTHER; note = 2'-O-methylcytidine-3'-phosphate
  modified_base 20: mod_base = OTHER; note = 2'-O-methyluridine-3'-phosphate
  modified_base 21: mod_base = OTHER; note = 2'-O-methylcytidine-3'-phosphorothioate
  modified_base 22: mod_base = OTHER; note = 2'-O-methylcytidine-3'-phosphorothioate
  modified_base 23: mod_base = OTHER; note = 2'-O-methyluridine
taagttacatgggctgctctcct

SEQ ID NO: 1585 - RNA, 23 nt, synthetic construct
  source 1..23: mol_type = other RNA
  modified_base 1: mod_base = OTHER; note = 2'-O-methyluridine-3'-phosphorothioate 5'-(E)-Vinylphosphonate
  modified_base 2: mod_base = OTHER; note = 2'-deoxy-2'-fluoroguanosine-3'-phosphorothioate
  modified_base 3: mod_base = OTHER; note = 2'-O-methylcytidine-3'-phosphate
  modified_base 4: mod_base = OTHER; note = 2'-O-methyluridine-3'-phosphate
  modified_base 5: mod_base = OTHER; note = 2'-O-methylguanosine-3'-phosphate
  modified_base 6: mod_base = OTHER; note = 2'-deoxy-2'-fluorouridine-3'-phosphate
  modified_base 7: mod_base = OTHER; note = 2'-O-methyladenosine-3'-phosphate
  modified_base 8: mod_base = OTHER; note = 2'-deoxy-2'-fluoroadenosine-3'-phosphate
  modified_base 9: mod_base = OTHER; note = 2'-deoxy-2'-fluoroguanosine-3'-phosphate
  modified_base 10: mod_base = OTHER; note = 2'-O-methyluridine-3'-phosphate
  modified_base 11: mod_base = OTHER; note = 2'-O-methyluridine-3'-phosphate
  modified_base 12: mod_base = OTHER; note = 2'-O-methyladenosine-3'-phosphate
  modified_base 13: mod_base = OTHER; note = 2'-O-methylcytidine-3'-phosphate
  modified_base 14: mod_base = OTHER; note = 2'-deoxy-2'-fluoroadenosine-3'-phosphate
  modified_base 15: mod_base = OTHER; note = 2'-O-methyluridine-3'-phosphate
  modified_base 16: mod_base = OTHER; note = 2'-deoxy-2'-fluoroguanosine-3'-phosphate
  modified_base 17: mod_base = OTHER; note = 2'-O-methylguanosine-3'-phosphate
  modified_base 18: mod_base = OTHER; note = 2'-O-methylguanosine-3'-phosphate
  modified_base 19: mod_base = OTHER; note = 2'-O-methylcytidine-3'-phosphate
  modified_base 20: mod_base = OTHER; note = 2'-O-methyluridine-3'-phosphate
  modified_base 21: mod_base = OTHER; note = 2'-O-methylguanosine-3'-phosphorothioate
  modified_base 22: mod_base = OTHER; note = 2'-O-methylcytidine-3'-phosphorothioate
  modified_base 23: mod_base = OTHER; note = 2'-O-methyluridine
tgctgtaagttacatgggctgct

SEQ ID NO: 1586 - RNA, 23 nt, synthetic construct
  source 1..23: mol_type = other RNA
  modified_base 1: mod_base = OTHER; note = 2'-O-methyluridine-3'-phosphorothioate 5'-(E)-Vinylphosphonate
  modified_base 2: mod_base = OTHER; note = 2'-deoxy-2'-fluorouridine-3'-phosphorothioate
  modified_base 3: mod_base = OTHER; note = 2'-O-methyluridine-3'-phosphate
  modified_base 4: mod_base = OTHER; note = 2'-O-methyladenosine-3'-phosphate
  modified_base 5: mod_base = OTHER; note = 2'-O-methylcytidine-3'-phosphate
  modified_base 6: mod_base = OTHER; note = 2'-deoxy-2'-fluorouridine-3'-phosphate
  modified_base 7: mod_base = OTHER; note = 2'-O-methylguanosine-3'-phosphate
  modified_base 8: mod_base = OTHER; note = 2'-deoxy-2'-fluoroguanosine-3'-phosphate
  modified_base 9: mod_base = OTHER; note = 2'-deoxy-2'-fluorocytidine-3'-phosphate
  modified_base 10: mod_base = OTHER; note = 2'-O-methyluridine-3'-phosphate
  modified_base 11: mod_base = OTHER; note = 2'-O-methylguanosine-3'-phosphate
  modified_base 12: mod_base = OTHER; note = 2'-O-methyluridine-3'-phosphate
  modified_base 13: mod_base = OTHER; note = 2'-O-methyladenosine-3'-phosphate
  modified_base 14: mod_base = OTHER; note = 2'-deoxy-2'-fluoroadenosine-3'-phosphate
  modified_base 15: mod_base = OTHER; note = 2'-O-methylguanosine-3'-phosphate
  modified_base 16: mod_base = OTHER; note = 2'-deoxy-2'-fluorouridine-3'-phosphate
  modified_base 17: mod_base = OTHER; note = 2'-O-methyluridine-3'-phosphate
  modified_base 18: mod_base = OTHER; note = 2'-O-methyladenosine-3'-phosphate
  modified_base 19: mod_base = OTHER; note = 2'-O-methylcytidine-3'-phosphate
  modified_base 20: mod_base = OTHER; note = 2'-O-methyladenosine-3'-phosphate
  modified_base 21: mod_base = OTHER; note = 2'-O-methyluridine-3'-phosphorothioate
  modified_base 22: mod_base = OTHER; note = 2'-O-methylguanosine-3'-phosphorothioate
  modified_base 23: mod_base = OTHER; note = 2'-O-methylguanosine
tttactggctgtaagttacatgg

SEQ ID NO: 1587 - RNA, 23 nt, synthetic construct
  source 1..23: mol_type = other RNA
  modified_base 1: mod_base = OTHER; note = 2'-O-methyluridine-3'-phosphorothioate 5'-(E)-Vinylphosphonate
  modified_base 2: mod_base = OTHER; note = 2'-deoxy-2'-fluoroadenosine-3'-phosphorothioate
  modified_base 3: mod_base = OTHER; note = 2'-O-methyladenosine-3'-phosphate
  modified_base 4: mod_base = OTHER; note = 2'-O-methylguanosine-3'-phosphate
  modified_base 5: mod_base = OTHER; note = 2'-O-methyladenosine-3'-phosphate
  modified_base 6: mod_base = OTHER; note = 2'-deoxy-2'-fluoroguanosine-3'-phosphate
  modified_base 7: mod_base = OTHER; note = 2'-O-methyluridine-3'-phosphate
  modified_base 8: mod_base = OTHER; note = 2'-deoxy-2'-fluorouridine-3'-phosphate
  modified_base 9: mod_base = OTHER; note = 2'-deoxy-2'-fluorouridine-3'-phosphate
  modified_base 10: mod_base = OTHER; note = 2'-O-methyladenosine-3'-phosphate
  modified_base 11: mod_base = OTHER; note = 2'-O-methylcytidine-3'-phosphate
  modified_base 12: mod_base = OTHER; note = 2'-O-methyluridine-3'-phosphate
  modified_base 13: mod_base = OTHER; note = 2'-O-methylguanosine-3'-phosphate
  modified_base 14: mod_base = OTHER; note = 2'-deoxy-2'-fluoroguanosine-3'-phosphate
  modified_base 15: mod_base = OTHER; note = 2'-O-methylcytidine-3'-phosphate
  modified_base 16: mod_base = OTHER; note = 2'-deoxy-2'-fluorouridine-3'-phosphate
  modified_base 17: mod_base = OTHER; note = 2'-O-methylguanosine-3'-phosphate
  modified_base 18: mod_base = OTHER; note = 2'-O-methyluridine-3'-phosphate
  modified_base 19: mod_base = OTHER; note = 2'-O-methyladenosine-3'-phosphate
  modified_base 20: mod_base = OTHER; note = 2'-O-methyladenosine-3'-phosphate
  modified_base 21: mod_base = OTHER; note = 2'-O-methylguanosine-3'-phosphorothioate
  modified_base 22: mod_base = OTHER; note = 2'-O-methyluridine-3'-phosphorothioate
  modified_base 23: mod_base = OTHER; note = 2'-O-methyluridine
taagagtttactggctgtaagtt

SEQ ID NO: 1588 - RNA, 23 nt, synthetic construct
  source 1..23: mol_type = other RNA
  modified_base 1: mod_base = OTHER; note = 2'-O-methyluridine-3'-phosphorothioate 5'-(E)-Vinylphosphonate
  modified_base 2: mod_base = OTHER; note = 2'-deoxy-2'-fluoroadenosine-3'-phosphorothioate
  modified_base 3: mod_base = OTHER; note = 2'-O-methyladenosine-3'-phosphate
  modified_base 4: mod_base = OTHER; note = 2'-O-methyluridine-3'-phosphate
  modified_base 5: mod_base = OTHER; note = 2'-O-methylcytidine-3'-phosphate
  modified_base 6: mod_base = OTHER; note = 2'-deoxy-2'-fluorocytidine-3'-phosphate
  modified_base 7: mod_base = OTHER; note = 2'-O-methyladenosine-3'-phosphate
  modified_base 8: mod_base = OTHER; note = 2'-deoxy-2'-fluoroadenosine-3'-phosphate
  modified_base 9: mod_base = OTHER; note = 2'-deoxy-2'-fluoroadenosine-3'-phosphate
  modified_base 10: mod_base = OTHER; note = 2'-O-methyladenosine-3'-phosphate
  modified_base 11: mod_base = OTHER; note = 2'-O-methylguanosine-3'-phosphate
  modified_base 12: mod_base = OTHER; note = 2'-O-methyladenosine-3'-phosphate
  modified_base 13: mod_base = OTHER; note = 2'-O-methylguanosine-3'-phosphate
  modified_base 14: mod_base = OTHER; note = 2'-deoxy-2'-fluorouridine-3'-phosphate
  modified_base 15: mod_base = OTHER; note = 2'-O-methyluridine-3'-phosphate
  modified_base 16: mod_base = OTHER; note = 2'-deoxy-2'-fluorouridine-3'-phosphate
  modified_base 17: mod_base = OTHER; note = 2'-O-methyladenosine-3'-phosphate
  modified_base 18: mod_base = OTHER; note = 2'-O-methylcytidine-3'-phosphate
  modified_base 19: mod_base = OTHER; note = 2'-O-methyluridine-3'-phosphate
  modified_base 20: mod_base = OTHER; note = 2'-O-methylguanosine-3'-phosphate
  modified_base 21: mod_base = OTHER; note = 2'-O-methylguanosine-3'-phosphorothioate
  modified_base 22: mod_base = OTHER; note = 2'-O-methylcytidine-3'-phosphorothioate
  modified_base 23: mod_base = OTHER; note = 2'-O-methyluridine
taatccaaaagagtttactggct

SEQ ID NO: 1589 - RNA, 23 nt, synthetic construct
  source 1..23: mol_type = other RNA
  modified_base 1: mod_base = OTHER; note = 2'-O-methyluridine-3'-phosphorothioate 5'-(E)-Vinylphosphonate
  modified_base 2: mod_base = OTHER; note = 2'-deoxy-2'-fluoroadenosine-3'-phosphorothioate
  modified_base 3: mod_base = OTHER; note = 2'-O-methyluridine-3'-phosphate
  modified_base 4: mod_base = OTHER; note = 2'-O-methyluridine-3'-phosphate
  modified_base 5: mod_base = OTHER; note = 2'-O-methylguanosine-3'-phosphate
  modified_base 6: mod_base = OTHER; note = 2'-deoxy-2'-fluoroguanosine-3'-phosphate
  modified_base 7: mod_base = OTHER; note = 2'-O-methylcytidine-3'-phosphate
  modified_base 8: mod_base = OTHER; note = 2'-deoxy-2'-fluoroadenosine-3'-phosphate
  modified_base 9: mod_base = OTHER; note = 2'-deoxy-2'-fluoroadenosine-3'-phosphate
  modified_base 10: mod_base = OTHER; note = 2'-O-methyladenosine-3'-phosphate
  modified_base 11: mod_base = OTHER; note = 2'-O-methyluridine-3'-phosphate
  modified_base 12: mod_base = OTHER; note = 2'-O-methylcytidine-3'-phosphate
  modified_base 13: mod_base = OTHER; note = 2'-O-methylcytidine-3'-phosphate
  modified_base 14: mod_base = OTHER; note = 2'-deoxy-2'-fluoroadenosine-3'-phosphate
  modified_base 15: mod_base = OTHER; note = 2'-O-methyladenosine-3'-phosphate
  modified_base 16: mod_base = OTHER; note = 2'-deoxy-2'-fluoroadenosine-3'-phosphate
  modified_base 17: mod_base = OTHER; note = 2'-O-methyladenosine-3'-phosphate
  modified_base 18: mod_base = OTHER; note = 2'-O-methylguanosine-3'-phosphate
  modified_base 19: mod_base = OTHER; note = 2'-O-methyladenosine-3'-phosphate
  modified_base 20: mod_base = OTHER; note = 2'-O-methylguanosine-3'-phosphate
  modified_base 21: mod_base = OTHER; note = 2'-O-methyluridine-3'-phosphorothioate
  modified_base 22: mod_base = OTHER; note = 2'-O-methyluridine-3'-phosphorothioate
  modified_base 23: mod_base = OTHER; note = 2'-O-methyluridine
tattggcaaatccaaaagagttt

SEQ ID NO: 1590 - RNA, 23 nt, synthetic construct
  source 1..23: mol_type = other RNA
  modified_base 1: mod_base = OTHER; note = 2'-O-methyluridine-3'-phosphorothioate 5'-(E)-Vinylphosphonate
  modified_base 2: mod_base = OTHER; note = 2'-deoxy-2'-fluoroadenosine-3'-phosphorothioate
  modified_base 3: mod_base = OTHER; note = 2'-O-methyladenosine-3'-phosphate
  modified_base 4: mod_base = OTHER; note = 2'-O-methyluridine-3'-phosphate
  modified_base 5: mod_base = OTHER; note = 2'-O-methyladenosine-3'-phosphate
  modified_base 6: mod_base = OTHER; note = 2'-deoxy-2'-fluorouridine-3'-phosphate
  modified_base 7: mod_base = OTHER; note = 2'-O-methyladenosine-3'-phosphate
  modified_base 8: mod_base = OTHER; note = 2'-deoxy-2'-fluorouridine-3'-phosphate
  modified_base 9: mod_base = OTHER; note = 2'-deoxy-2'-fluoroguanosine-3'-phosphate
  modified_base 10: mod_base = OTHER; note = 2'-O-methyladenosine-3'-phosphate
  modified_base 11: mod_base = OTHER; note = 2'-O-methyladenosine-3'-phosphate
  modified_base 12: mod_base = OTHER; note = 2'-O-methyluridine-3'-phosphate
  modified_base 13: mod_base = OTHER; note = 2'-O-methyluridine-3'-phosphate
  modified_base 14: mod_base = OTHER; note = 2'-deoxy-2'-fluoroguanosine-3'-phosphate
  modified_base 15: mod_base = OTHER; note = 2'-O-methylguanosine-3'-phosphate
  modified_base 16: mod_base = OTHER; note = 2'-deoxy-2'-fluorocytidine-3'-phosphate
  modified_base 17: mod_base = OTHER; note = 2'-O-methyladenosine-3'-phosphate
  modified_base 18: mod_base = OTHER; note = 2'-O-methyladenosine-3'-phosphate
  modified_base 19: mod_base = OTHER; note = 2'-O-methyladenosine-3'-phosphate
  modified_base 20: mod_base = OTHER; note = 2'-O-methyluridine-3'-phosphate
  modified_base 21: mod_base = OTHER; note = 2'-O-methylcytidine-3'-phosphorothioate
  modified_base 22: mod_base = OTHER; note = 2'-O-methylcytidine-3'-phosphorothioate
  modified_base 23: mod_base = OTHER; note = 2'-O-methyladenosine
taatatatgaattggcaaatcca

SEQ ID NO: 1591 - RNA, 23 nt, synthetic construct
  source 1..23: mol_type = other RNA
  modified_base 1: mod_base = OTHER; note = 2'-O-methyluridine-3'-phosphorothioate 5'-(E)-Vinylphosphonate
  modified_base 2: mod_base = OTHER; note = 2'-deoxy-2'-fluoroadenosine-3'-phosphorothioate
  modified_base 3: mod_base = OTHER; note = 2'-O-methyluridine-3'-phosphate
  modified_base 4: mod_base = OTHER; note = 2'-O-methylguanosine-3'-phosphate
  modified_base 5: mod_base = OTHER; note = 2'-O-methylcytidine-3'-phosphate
  modified_base 6: mod_base = OTHER; note = 2'-deoxy-2'-fluoroadenosine-3'-phosphate
  modified_base 7: mod_base = OTHER; note = 2'-O-methyluridine-3'-phosphate
  modified_base 8: mod_base = OTHER; note = 2'-deoxy-2'-fluoroguanosine-3'-phosphate
  modified_base 9: mod_base = OTHER; note = 2'-deoxy-2'-fluoroguanosine-3'-phosphate
  modified_base 10: mod_base = OTHER; note = 2'-O-methylcytidine-3'-phosphate
  modified_base 11: mod_base = OTHER; note = 2'-O-methyladenosine-3'-phosphate
  modified_base 12: mod_base = OTHER; note = 2'-O-methyladenosine-3'-phosphate
  modified_base 13: mod_base = OTHER; note = 2'-O-methyluridine-3'-phosphate
  modified_base 14: mod_base = OTHER; note = 2'-deoxy-2'-fluoroadenosine-3'-phosphate
  modified_base 15: mod_base = OTHER; note = 2'-O-methyluridine-3'-phosphate
  modified_base 16: mod_base = OTHER; note = 2'-deoxy-2'-fluoroadenosine-3'-phosphate
  modified_base 17: mod_base = OTHER; note = 2'-O-methyluridine-3'-phosphate
  modified_base 18: mod_base = OTHER; note = 2'-O-methylguanosine-3'-phosphate
  modified_base 19: mod_base = OTHER; note = 2'-O-methyladenosine-3'-phosphate
  modified_base 20: mod_base = OTHER; note = 2'-O-methyladenosine-3'-phosphate
  modified_base 21: mod_base = OTHER; note = 2'-O-methyluridine-3'-phosphorothioate
  modified_base 22: mod_base = OTHER; note = 2'-O-methyluridine-3'-phosphorothioate
  modified_base 23: mod_base = OTHER; note = 2'-O-methylguanosine
tatgcatggcaatatatgaattg

SEQ ID NO: 1592 - RNA, 23 nt, synthetic construct
  source 1..23: mol_type = other RNA
  modified_base 1: mod_base = OTHER; note = 2'-O-methyluridine-3'-phosphorothioate 5'-(E)-Vinylphosphonate
  modified_base 2: mod_base = OTHER; note = 2'-deoxy-2'-fluoroguanosine-3'-phosphorothioate
  modified_base 3: mod_base = OTHER; note = 2'-O-methyluridine-3'-phosphate
  modified_base 4: mod_base = OTHER; note = 2'-O-methylguanosine-3'-phosphate
  modified_base 5: mod_base = OTHER; note = 2'-O-methyladenosine-3'-phosphate
  modified_base 6: mod_base = OTHER; note = 2'-deoxy-2'-fluorouridine-3'-phosphate
  modified_base 7: mod_base = OTHER; note = 2'-O-methyladenosine-3'-phosphate
  modified_base 8: mod_base = OTHER; note = 2'-deoxy-2'-fluoroadenosine-3'-phosphate
  modified_base 9: mod_base = OTHER; note = 2'-deoxy-2'-fluorouridine-3'-phosphate
  modified_base 10: mod_base = OTHER; note = 2'-O-methylguanosine-3'-phosphate
  modified_base 11: mod_base = OTHER; note = 2'-O-methylcytidine-3'-phosphate
  modified_base 12: mod_base = OTHER; note = 2'-O-methyladenosine-3'-phosphate
  modified_base 13: mod_base = OTHER; note = 2'-O-methyluridine-3'-phosphate
  modified_base 14: mod_base = OTHER; note = 2'-deoxy-2'-fluoroguanosine-3'-phosphate
  modified_base 15: mod_base = OTHER; note = 2'-O-methylguanosine-3'-phosphate
  modified_base 16: mod_base = OTHER; note = 2'-deoxy-2'-fluorocytidine-3'-phosphate
  modified_base 17: mod_base = OTHER; note = 2'-O-methyladenosine-3'-phosphate
  modified_base 18: mod_base = OTHER; note = 2'-O-methyladenosine-3'-phosphate
  modified_base 19: mod_base = OTHER; note = 2'-O-methyluridine-3'-phosphate
  modified_base 20: mod_base = OTHER; note = 2'-O-methyladenosine-3'-phosphate
  modified_base 21: mod_base = OTHER; note = 2'-O-methyluridine-3'-phosphorothioate
  modified_base 22: mod_base = OTHER; note = 2'-O-methyladenosine-3'-phosphorothioate
  modified_base 23: mod_base = OTHER; note = 2'-O-methyluridine
tgtgataatgcatggcaatatat

SEQ ID NO: 1593 - RNA, 23 nt, synthetic construct
  source 1..23: mol_type = other RNA
  modified_base 1: mod_base = OTHER; note = 2'-O-methyluridine-3'-phosphorothioate 5'-(E)-Vinylphosphonate
  modified_base 2: mod_base = OTHER; note = 2'-deoxy-2'-fluorouridine-3'-phosphorothioate
  modified_base 3: mod_base = OTHER; note = 2'-O-methyluridine-3'-phosphate
  modified_base 4: mod_base = OTHER; note = 2'-O-methyladenosine-3'-phosphate
  modified_base 5: mod_base = OTHER; note = 2'-O-methylguanosine-3'-phosphate
  modified_base 6: mod_base = OTHER; note = 2'-deoxy-2'-fluorouridine-3'-phosphate
  modified_base 7: mod_base = OTHER; note = 2'-O-methylguanosine-3'-phosphate
  modified_base 8: mod_base = OTHER; note = 2'-deoxy-2'-fluoroguanosine-3'-phosphate
  modified_base 9: mod_base = OTHER; note = 2'-deoxy-2'-fluorouridine-3'-phosphate
  modified_base 10: mod_base = OTHER; note = 2'-O-methylguanosine-3'-phosphate
  modified_base 11: mod_base = OTHER; note = 2'-O-methyluridine-3'-phosphate
  modified_base 12: mod_base = OTHER; note = 2'-O-methylguanosine-3'-phosphate
  modified_base 13: mod_base = OTHER; note = 2'-O-methyladenosine-3'-phosphate
  modified_base 14: mod_base = OTHER; note = 2'-deoxy-2'-fluorouridine-3'-phosphate
  modified_base 15: mod_base = OTHER; note = 2'-O-methyladenosine-3'-phosphate
  modified_base 16: mod_base = OTHER; note = 2'-deoxy-2'-fluoroadenosine-3'-phosphate
  modified_base 17: mod_base = OTHER; note = 2'-O-methyluridine-3'-phosphate
  modified_base 18: mod_base = OTHER; note = 2'-O-methylguanosine-3'-phosphate
  modified_base 19: mod_base = OTHER; note = 2'-O-methylcytidine-3'-phosphate
  modified_base 20: mod_base = OTHER; note = 2'-O-methyladenosine-3'-phosphate
  modified_base 21: mod_base = OTHER; note = 2'-O-methyluridine-3'-phosphorothioate
  modified_base 22: mod_base = OTHER; note = 2'-O-methylguanosine-3'-phosphorothioate
  modified_base 23: mod_base = OTHER; note = 2'-O-methylguanosine
tttagtggtgtgataatgcatgg

SEQ ID NO: 1594 - RNA, 23 nt, synthetic construct
  source 1..23: mol_type = other RNA
  modified_base 1: mod_base = OTHER; note = 2'-O-methyluridine-3'-phosphorothioate 5'-(E)-Vinylphosphonate
  modified_base 2: mod_base = OTHER; note = 2'-deoxy-2'-fluoroadenosine-3'-phosphorothioate
  modified_base 3: mod_base = OTHER; note = 2'-O-methyladenosine-3'-phosphate
  modified_base 4: mod_base = OTHER; note = 2'-O-methylguanosine-3'-phosphate
  modified_base 5: mod_base = OTHER; note = 2'-O-methyluridine-3'-phosphate
  modified_base 6: mod_base = OTHER; note = 2'-deoxy-2'-fluorocytidine-3'-phosphate
  modified_base 7: mod_base = OTHER; note = 2'-O-methyladenosine-3'-phosphate
  modified_base 8: mod_base = OTHER; note = 2'-deoxy-2'-fluorouridine-3'-phosphate
  modified_base 9: mod_base = OTHER; note = 2'-deoxy-2'-fluorouridine-3'-phosphate
  modified_base 10: mod_base = OTHER; note = 2'-O-methyladenosine-3'-phosphate
  modified_base 11: mod_base = OTHER; note = 2'-O-methylguanosine-3'-phosphate
  modified_base 12: mod_base = OTHER; note = 2'-O-methyluridine-3'-phosphate
  modified_base 13: mod_base = OTHER; note = 2'-O-methylguanosine-3'-phosphate
  modified_base 14: mod_base = OTHER; note = 2'-deoxy-2'-fluoroguanosine-3'-phosphate
  modified_base 15: mod_base = OTHER; note = 2'-O-methyluridine-3'-phosphate
  modified_base 16: mod_base = OTHER; note = 2'-deoxy-2'-fluoroguanosine-3'-phosphate
  modified_base 17: mod_base = OTHER; note = 2'-O-methyluridine-3'-phosphate
  modified_base 18: mod_base = OTHER; note = 2'-O-methylguanosine-3'-phosphate
  modified_base 19: mod_base = OTHER; note = 2'-O-methyladenosine-3'-phosphate
  modified_base 20: mod_base = OTHER; note = 2'-O-methyluridine-3'-phosphate
  modified_base 21: mod_base = OTHER; note = 2'-O-methyladenosine-3'-phosphorothioate
  modified_base 22: mod_base = OTHER; note = 2'-O-methyladenosine-3'-phosphorothioate
  modified_base 23: mod_base = OTHER; note = 2'-O-methyluridine
taagtcattagtggtgtgataat

SEQ ID NO: 1595 - RNA, 23 nt, synthetic construct
  source 1..23: mol_type = other RNA
  modified_base 1: mod_base = OTHER; note = 2'-O-methyluridine-3'-phosphorothioate 5'-(E)-Vinylphosphonate
  modified_base 2: mod_base = OTHER; note = 2'-deoxy-2'-fluoroguanosine-3'-phosphorothioate
  modified_base 3: mod_base = OTHER; note = 2'-O-methylcytidine-3'-phosphate
  modified_base 4: mod_base = OTHER; note = 2'-O-methyladenosine-3'-phosphate
  modified_base 5: mod_base = OTHER; note = 2'-O-methylcytidine-3'-phosphate
  modified_base 6: mod_base = OTHER; note = 2'-deoxy-2'-fluorouridine-3'-phosphate
  modified_base 7: mod_base = OTHER; note = 2'-O-methyladenosine-3'-phosphate
  modified_base 8: mod_base = OTHER; note = 2'-deoxy-2'-fluoroadenosine-3'-phosphate
  modified_base 9: mod_base = OTHER; note = 2'-deoxy-2'-fluoroguanosine-3'-phosphate
  modified_base 10: mod_base = OTHER; note = 2'-O-methyluridine-3'-phosphate
  modified_base 11: mod_base = OTHER; note = 2'-O-methylcytidine-3'-phosphate
  modified_base 12: mod_base = OTHER; note = 2'-O-methyladenosine-3'-phosphate
  modified_base 13: mod_base = OTHER; note = 2'-O-methyluridine-3'-phosphate
  modified_base 14: mod_base = OTHER; note = 2'-deoxy-2'-fluorouridine-3'-phosphate
  modified_base 15: mod_base = OTHER; note = 2'-O-methyladenosine-3'-phosphate
  modified_base 16: mod_base = OTHER; note = 2'-deoxy-2'-fluoroguanosine-3'-phosphate
  modified_base 17: mod_base = OTHER; note = 2'-O-methyluridine-3'-phosphate
  modified_base 18: mod_base = OTHER; note = 2'-O-methylguanosine-3'-phosphate
  modified_base 19: mod_base = OTHER; note = 2'-O-methylguanosine-3'-phosphate
  modified_base 20: mod_base = OTHER; note = 2'-O-methyluridine-3'-phosphate
  modified_base 21: mod_base = OTHER; note = 2'-O-methylguanosine-3'-phosphorothioate
  modified_base 22: mod_base = OTHER; note = 2'-O-methyluridine-3'-phosphorothioate
  modified_base 23: mod_base = OTHER; note = 2'-O-methylguanosine
tgcactaagtcattagtggtgtg

SEQ ID NO: 1596 - RNA, 23 nt, synthetic construct
  source 1..23: mol_type = other RNA
  modified_base 1: mod_base = OTHER; note = 2'-O-methyluridine-3'-phosphorothioate 5'-(E)-Vinylphosphonate
  modified_base 2: mod_base = OTHER; note = 2'-deoxy-2'-fluorouridine-3'-phosphorothioate
  modified_base 3: mod_base = OTHER; note = 2'-O-methyladenosine-3'-phosphate
  modified_base 4: mod_base = OTHER; note = 2'-O-methyluridine-3'-phosphate
  modified_base 5: mod_base = OTHER; note = 2'-O-methyluridine-3'-phosphate
  modified_base 6: mod_base = OTHER; note = 2'-deoxy-2'-fluorocytidine-3'-phosphate
  modified_base 7: mod_base = OTHER; note = 2'-O-methylcytidine-3'-phosphate
  modified_base 8: mod_base = OTHER; note = 2'-deoxy-2'-fluorouridine-3'-phosphate
  modified_base 9: mod_base = OTHER; note = 2'-deoxy-2'-fluoroguanosine-3'-phosphate
  modified_base 10: mod_base = OTHER; note = 2'-O-methylcytidine-3'-phosphate
  modified_base 11: mod_base = OTHER; note = 2'-O-methyladenosine-3'-phosphate
  modified_base 12: mod_base = OTHER; note = 2'-O-methylcytidine-3'-phosphate
  modified_base 13: mod_base = OTHER; note = 2'-O-methyluridine-3'-phosphate
  modified_base 14: mod_base = OTHER; note = 2'-deoxy-2'-fluoroadenosine-3'-phosphate
  modified_base 15: mod_base = OTHER; note = 2'-O-methyladenosine-3'-phosphate
  modified_base 16: mod_base = OTHER; note = 2'-deoxy-2'-fluoroguanosine-3'-phosphate
  modified_base 17: mod_base = OTHER; note = 2'-O-methyluridine-3'-phosphate
  modified_base 18: mod_base = OTHER; note = 2'-O-methylcytidine-3'-phosphate
  modified_base 19: mod_base = OTHER; note = 2'-O-methyladenosine-3'-phosphate
  modified_base 20: mod_base = OTHER; note = 2'-O-methyluridine-3'-phosphate
  modified_base 21: mod_base = OTHER; note = 2'-O-methyluridine-3'-phosphorothioate
  modified_base 22: mod_base = OTHER; note = 2'-O-methyladenosine-3'-phosphorothioate
  modified_base 23: mod_base = OTHER; note = 2'-O-methylguanosine
ttattcctgcactaagtcattag

SEQ ID NO: 1597 - RNA, 23 nt, synthetic construct
  source 1..23: mol_type = other RNA
  modified_base 1: mod_base = OTHER; note = 2'-O-methyluridine-3'-phosphorothioate 5'-(E)-Vinylphosphonate
  modified_base 2: mod_base = OTHER; note = 2'-deoxy-2'-fluorocytidine-3'-phosphorothioate
  modified_base 3: mod_base = OTHER; note = 2'-O-methyluridine-3'-phosphate
  modified_base 4: mod_base = OTHER; note = 2'-O-methylguanosine-3'-phosphate
  modified_base 5: mod_base = OTHER; note = 2'-O-methyluridine-3'-phosphate
  modified_base 6: mod_base = OTHER; note = 2'-deoxy-2'-fluorocytidine-3'-phosphate
  modified_base 7: mod_base = OTHER; note = 2'-O-methyladenosine-3'-phosphate
  modified_base 8: mod_base = OTHER; note = 2'-deoxy-2'-fluorouridine-3'-phosphate
  modified_base 9: mod_base = OTHER; note = 2'-deoxy-2'-fluoroadenosine-3'-phosphate
  modified_base 10: mod_base = OTHER; note = 2'-O-methyluridine-3'-phosphate
  modified_base 11: mod_base = OTHER; note = 2'-O-methyluridine-3'-phosphate
  modified_base 12: mod_base = OTHER; note = 2'-O-methylcytidine-3'-phosphate
  modified_base 13: mod_base = OTHER; note = 2'-O-methylcytidine-3'-phosphate
  modified_base 14: mod_base = OTHER; note = 2'-deoxy-2'-fluorouridine-3'-phosphate
  modified_base 15: mod_base = OTHER; note = 2'-O-methylguanosine-3'-phosphate
  modified_base 16: mod_base = OTHER; note = 2'-deoxy-2'-fluorocytidine-3'-phosphate
  modified_base 17: mod_base = OTHER; note = 2'-O-methyladenosine-3'-phosphate
  modified_base 18: mod_base = OTHER; note = 2'-O-methylcytidine-3'-phosphate
  modified_base 19: mod_base = OTHER; note = 2'-O-methyluridine-3'-phosphate
  modified_base 20: mod_base = OTHER; note = 2'-O-methyladenosine-3'-phosphate
  modified_base 21: mod_base = OTHER; note = 2'-O-methyladenosine-3'-phosphorothioate
  modified_base 22: mod_base = OTHER; note = 2'-O-methylguanosine-3'-phosphorothioate
  modified_base 23: mod_base = OTHER; note = 2'-O-methyluridine
tctgtcatattcctgcactaagt

SEQ ID NO: 1598 - RNA, 23 nt, synthetic construct
  source 1..23: mol_type = other RNA
  modified_base 1: mod_base = OTHER; note = 2'-O-methyluridine-3'-phosphorothioate 5'-(E)-Vinylphosphonate
  modified_base 2: mod_base = OTHER; note = 2'-deoxy-2'-fluoroadenosine-3'-phosphorothioate
  modified_base 3: mod_base = OTHER; note = 2'-O-methyladenosine-3'-phosphate
  modified_base 4: mod_base = OTHER; note = 2'-O-methylguanosine-3'-phosphate
  modified_base 5: mod_base = OTHER; note = 2'-O-methyluridine-3'-phosphate
  modified_base 6: mod_base = OTHER; note = 2'-deoxy-2'-fluoroguanosine-3'-phosphate
  modified_base 7: mod_base = OTHER; note = 2'-O-methylcytidine-3'-phosphate
  modified_base 8: mod_base = OTHER; note = 2'-deoxy-2'-fluorouridine-3'-phosphate
  modified_base 9: mod_base = OTHER; note = 2'-deoxy-2'-fluoroguanosine-3'-phosphate
  modified_base 10: mod_base = OTHER; note = 2'-O-methyluridine-3'-phosphate
  modified_base 11: mod_base = OTHER; note = 2'-O-methylcytidine-3'-phosphate
  modified_base 12: mod_base = OTHER; note = 2'-O-methyladenosine-3'-phosphate
  modified_base 13: mod_base = OTHER; note = 2'-O-methyluridine-3'-phosphate
  modified_base 14: mod_base = OTHER; note = 2'-deoxy-2'-fluoroadenosine-3'-phosphate
  modified_base 15: mod_base = OTHER; note = 2'-O-methyluridine-3'-phosphate
  modified_base 16: mod_base = OTHER; note = 2'-deoxy-2'-fluorouridine-3'-phosphate
  modified_base 17: mod_base = OTHER; note = 2'-O-methylcytidine-3'-phosphate
  modified_base 18: mod_base = OTHER; note = 2'-O-methylcytidine-3'-phosphate
  modified_base 19: mod_base = OTHER; note = 2'-O-methyluridine-3'-phosphate
  modified_base 20: mod_base = OTHER; note = 2'-O-methylguanosine-3'-phosphate
  modified_base 21: mod_base = OTHER; note = 2'-O-methylcytidine-3'-phosphorothioate
  modified_base 22: mod_base = OTHER; note = 2'-O-methyladenosine-3'-phosphorothioate
  modified_base 23: mod_base = OTHER; note = 2'-O-methylcytidine
taagtgctgtcatattcctgcac

SEQ ID NO: 1599 - RNA, 23 nt, synthetic construct
  source 1..23: mol_type = other RNA
  modified_base 1: mod_base = OTHER; note = 2'-O-methyluridine-3'-phosphorothioate 5'-(E)-Vinylphosphonate
  modified_base 2: mod_base = OTHER; note = 2'-deoxy-2'-fluorouridine-3'-phosphorothioate
  modified_base 3: mod_base = OTHER; note = 2'-O-methyluridine-3'-phosphate
  modified_base 4: mod_base = OTHER; note = 2'-O-methylguanosine-3'-phosphate
  modified_base 5: mod_base = OTHER; note = 2'-O-methylguanosine-3'-phosphate
  modified_base 6: mod_base = OTHER; note = 2'-deoxy-2'-fluorocytidine-3'-phosphate
  modified_base 7: mod_base = OTHER; note = 2'-O-methyluridine-3'-phosphate
  modified_base 8: mod_base = OTHER; note = 2'-deoxy-2'-fluoroguanosine-3'-phosphate
  modified_base 9: mod_base = OTHER; note = 2'-deoxy-2'-fluoroadenosine-3'-phosphate
  modified_base 10: mod_base = OTHER; note = 2'-O-methyladenosine-3'-phosphate
  modified_base 11: mod_base = OTHER; note = 2'-O-methylguanosine-3'-phosphate
  modified_base 12: mod_base = OTHER; note = 2'-O-methyluridine-3'-phosphate
  modified_base 13: mod_base = OTHER; note = 2'-O-methylguanosine-3'-phosphate
  modified_base 14: mod_base = OTHER; note = 2'-deoxy-2'-fluorocytidine-3'-phosphate
  modified_base 15: mod_base = OTHER; note = 2'-O-methyluridine-3'-phosphate
  modified_base 16: mod_base = OTHER; note = 2'-deoxy-2'-fluoroguanosine-3'-phosphate
  modified_base 17: mod_base = OTHER; note = 2'-O-methyluridine-3'-phosphate
  modified_base 18: mod_base = OTHER; note = 2'-O-methylcytidine-3'-phosphate
  modified_base 19: mod_base = OTHER; note = 2'-O-methyladenosine-3'-phosphate
  modified_base 20: mod_base = OTHER; note = 2'-O-methyluridine-3'-phosphate
  modified_base 21: mod_base = OTHER; note = 2'-O-methyladenosine-3'-phosphorothioate
  modified_base 22: mod_base = OTHER; note = 2'-O-methyluridine-3'-phosphorothioate
  modified_base 23: mod_base = OTHER; note = 2'-O-methyluridine
tttggctgaagtgctgtcatatt

SEQ ID NO: 1600 - RNA, 23 nt, synthetic construct
  source 1..23: mol_type = other RNA
  modified_base 1: mod_base = OTHER; note = 2'-O-methyluridine-3'-phosphorothioate 5'-(E)-Vinylphosphonate
  modified_base 2: mod_base = OTHER; note = 2'-deoxy-2'-fluoroguanosine-3'-phosphorothioate
  modified_base 3: mod_base = OTHER; note = 2'-O-methyladenosine-3'-phosphate
  modified_base 4: mod_base = OTHER; note = 2'-O-methyladenosine-3'-phosphate
  modified_base 5: mod_base = OTHER; note = 2'-O-methyluridine-3'-phosphate
  modified_base 6: mod_base = OTHER; note = 2'-deoxy-2'-fluorocytidine-3'-phosphate
  modified_base 7: mod_base = OTHER; note = 2'-O-methyluridine-3'-phosphate
  modified_base 8: mod_base = OTHER; note = 2'-deoxy-2'-fluoroguanosine-3'-phosphate
  modified_base 9: mod_base = OTHER; note = 2'-deoxy-2'-fluorocytidine-3'-phosphate
  modified_base 10: mod_base = OTHER; note = 2'-O-methyluridine-3'-phosphate
  modified_base 11: mod_base = OTHER; note = 2'-O-methyluridine-3'-phosphate
  modified_base 12: mod_base = OTHER; note = 2'-O-methylguanosine-3'-phosphate
  modified_base 13: mod_base = OTHER; note = 2'-O-methylguanosine-3'-phosphate
  modified_base 14: mod_base = OTHER; note = 2'-deoxy-2'-fluorocytidine-3'-phosphate
  modified_base 15: mod_base = OTHER; note = 2'-O-methyluridine-3'-phosphate
  modified_base 16: mod_base = OTHER; note = 2'-deoxy-2'-fluoroguanosine-3'-phosphate
  modified_base 17: mod_base = OTHER; note = 2'-O-methyladenosine-3'-phosphate
  modified_base 18: mod_base = OTHER; note = 2'-O-methyladenosine-3'-phosphate
  modified_base 19: mod_base = OTHER; note = 2'-O-methylguanosine-3'-phosphate
  modified_base 20: mod_base = OTHER; note = 2'-O-methyluridine-3'-phosphate
  modified_base 21: mod_base = OTHER; note = 2'-O-methylguanosine-3'-phosphorothioate
  modified_base 22: mod_base = OTHER; note = 2'-O-methylcytidine-3'-phosphorothioate
  modified_base 23: mod_base = OTHER; note = 2'-O-methyluridine
tgaatctgcttggctgaagtgct

SEQ ID NO: 1601 - RNA, 23 nt, synthetic construct
  source 1..23: mol_type = other RNA
  modified_base 1: mod_base = OTHER; note = 2'-O-methyluridine-3'-phosphorothioate 5'-(E)-Vinylphosphonate
  modified_base 2: mod_base = OTHER; note = 2'-deoxy-2'-fluoroguanosine-3'-phosphorothioate
  modified_base 3: mod_base = OTHER; note = 2'-O-methyladenosine-3'-phosphate
  modified_base 4: mod_base = OTHER; note = 2'-O-methylcytidine-3'-phosphate
  modified_base 5: mod_base = OTHER; note = 2'-O-methyluridine-3'-phosphate
  modified_base 6: mod_base = OTHER; note = 2'-deoxy-2'-fluoroguanosine-3'-phosphate
  modified_base 7: mod_base = OTHER; note = 2'-O-methylguanosine-3'-phosphate
  modified_base 8: mod_base = OTHER; note = 2'-deoxy-2'-fluoroadenosine-3'-phosphate
  modified_base 9: mod_base = OTHER; note = 2'-deoxy-2'-fluoroadenosine-3'-phosphate
  modified_base 10: mod_base = OTHER; note = 2'-O-methyluridine-3'-phosphate
  modified_base 11: mod_base = OTHER; note = 2'-O-methylcytidine-3'-phosphate
  modified_base 12: mod_base = OTHER; note = 2'-O-methyluridine-3'-phosphate
  modified_base 13: mod_base = OTHER; note = 2'-O-methylguanosine-3'-phosphate
  modified_base 14: mod_base = OTHER; note = 2'-deoxy-2'-fluorocytidine-3'-phosphate
  modified_base 15: mod_base = OTHER; note = 2'-O-methyluridine-3'-phosphate
  modified_base 16: mod_base = OTHER; note = 2'-deoxy-2'-fluorouridine-3'-phosphate
  modified_base 17: mod_base = OTHER; note = 2'-O-methylguanosine-3'-phosphate
  modified_base 18: mod_base = OTHER; note = 2'-O-methylguanosine-3'-phosphate
  modified_base 19: mod_base = OTHER; note = 2'-O-methylcytidine-3'-phosphate
  modified_base 20: mod_base = OTHER; note = 2'-O-methyluridine-3'-phosphate
  modified_base 21: mod_base = OTHER; note = 2'-O-methylguanosine-3'-phosphorothioate
  modified_base 22: mod_base = OTHER; note = 2'-O-methyladenosine-3'-phosphorothioate
  modified_base 23: mod_base = OTHER; note = 2'-O-methyladenosine
tgactggaatctgcttggctgaa

SEQ ID NO: 1602 - RNA, 23 nt, synthetic construct
  source 1..23: mol_type = other RNA
  modified_base 1: mod_base = OTHER; note = 2'-O-methyluridine-3'-phosphorothioate 5'-(E)-Vinylphosphonate
  modified_base 2: mod_base = OTHER; note = 2'-deoxy-2'-fluorocytidine-3'-phosphorothioate
  modified_base 3: mod_base = OTHER; note = 2'-O-methyluridine-3'-phosphate
  modified_base 4: mod_base = OTHER; note = 2'-O-methylcytidine-3'-phosphate
  modified_base 5: mod_base = OTHER; note = 2'-O-methylcytidine-3'-phosphate
  modified_base 6: mod_base = OTHER; note = 2'-deoxy-2'-fluoroadenosine-3'-phosphate
  modified_base 7: mod_base = OTHER; note = 2'-O-methyluridine-3'-phosphate
  modified_base 8: mod_base = OTHER; note = 2'-deoxy-2'-fluoroguanosine-3'-phosphate
  modified_base 9: mod_base = OTHER; note = 2'-deoxy-2'-fluoroadenosine-3'-phosphate
  modified_base 10: mod_base = OTHER; note = 2'-O-methylcytidine-3'-phosphate
  modified_base 11: mod_base = OTHER; note = 2'-O-methyluridine-3'-phosphate
  modified_base 12: mod_base = OTHER; note = 2'-O-methyluridine-3'-phosphate
  modified_base 13: mod_base = OTHER; note = 2'-O-methyluridine-3'-phosphate
  modified_base 14: mod_base = OTHER; note = 2'-deoxy-2'-fluoroadenosine-3'-phosphate
  modified_base 15: mod_base = OTHER; note = 2'-O-methyladenosine-3'-phosphate
  modified_base 16: mod_base = OTHER; note = 2'-deoxy-2'-fluoroadenosine-3'-phosphate
  modified_base 17: mod_base = OTHER; note = 2'-O-methylcytidine-3'-phosphate
  modified_base 18: mod_base = OTHER; note = 2'-O-methylguanosine-3'-phosphate
  modified_base 19: mod_base = OTHER; note = 2'-O-methylguanosine-3'-phosphate
  modified_base 20: mod_base = OTHER; note = 2'-O-methyladenosine-3'-phosphate
  modified_base 21: mod_base = OTHER; note = 2'-O-methylguanosine-3'-phosphorothioate
  modified_base 22: mod_base = OTHER; note = 2'-O-methylguanosine-3'-phosphorothioate
  modified_base 23: mod_base = OTHER; note = 2'-O-methylguanosine
tctccatgactttaaacggaggg

SEQ ID NO: 1603 - RNA, 23 nt, synthetic construct
  source 1..23: mol_type = other RNA
  modified_base 1: mod_base = OTHER; note = 2'-O-methyluridine-3'-phosphorothioate 5'-(E)-Vinylphosphonate
  modified_base 2: mod_base = OTHER; note = 2'-deoxy-2'-fluorocytidine-3'-phosphorothioate
  modified_base 3: mod_base = OTHER; note = 2'-O-methylcytidine-3'-phosphate
  modified_base 4: mod_base = OTHER; note = 2'-O-methyluridine-3'-phosphate
  modified_base 5: mod_base = OTHER; note = 2'-O-methyladenosine-3'-phosphate
  modified_base 6: mod_base = OTHER; note = 2'-deoxy-2'-fluorouridine-3'-phosphate
  modified_base 7: mod_base = OTHER; note = 2'-O-methyladenosine-3'-phosphate
  modified_base 8: mod_base = OTHER; note = 2'-deoxy-2'-fluoroguanosine-3'-phosphate
  modified_base 9: mod_base = OTHER; note = 2'-deoxy-2'-fluorocytidine-3'-phosphate
  modified_base 10: mod_base = OTHER; note = 2'-O-methylcytidine-3'-phosphate
  modified_base 11: mod_base = OTHER; note = 2'-O-methyluridine-3'-phosphate
  modified_base 12: mod_base = OTHER; note = 2'-O-methylcytidine-3'-phosphate
  modified_base 13: mod_base = OTHER; note = 2'-O-methylcytidine-3'-phosphate
  modified_base 14: mod_base = OTHER; note = 2'-deoxy-2'-fluoroadenosine-3'-phosphate
  modified_base 15: mod_base = OTHER; note = 2'-O-methyluridine-3'-phosphate
  modified_base 16: mod_base = OTHER; note = 2'-deoxy-2'-fluoroguanosine-3'-phosphate
  modified_base 17: mod_base = OTHER; note = 2'-O-methyladenosine-3'-phosphate
  modified_base 18: mod_base = OTHER; note = 2'-O-methylcytidine-3'-phosphate
  modified_base 19: mod_base = OTHER; note = 2'-O-methyluridine-3'-phosphate
  modified_base 20: mod_base = OTHER; note = 2'-O-methyluridine-3'-phosphate
  modified_base 21: mod_base = OTHER; note = 2'-O-methyluridine-3'-phosphorothioate
  modified_base 22: mod_base = OTHER; note = 2'-O-methyladenosine-3'-phosphorothioate
  modified_base 23: mod_base = OTHER; note = 2'-O-methyladenosine
tcctatagcctccatgactttaa

SEQ ID NO: 1604 - RNA, 23 nt, synthetic construct
  source 1..23: mol_type = other RNA
  modified_base 1: mod_base = OTHER; note = 2'-O-methyluridine-3'-phosphorothioate 5'-(E)-Vinylphosphonate
  modified_base 2: mod_base = OTHER; note = 2'-deoxy-2'-fluorocytidine-3'-phosphorothioate
  modified_base 3: mod_base = OTHER; note = 2'-O-methyladenosine-3'-phosphate
  modified_base 4: mod_base = OTHER; note = 2'-O-methyluridine-3'-phosphate
  modified_base 5: mod_base = OTHER; note = 2'-O-methyladenosine-3'-phosphate
  modified_base 6: mod_base = OTHER; note = 2'-deoxy-2'-fluoroadenosine-3'-phosphate
  modified_base 7: mod_base = OTHER; note = 2'-O-methylguanosine-3'-phosphate
  modified_base 8: mod_base = OTHER; note = 2'-deoxy-2'-fluoroadenosine-3'-phosphate
  modified_base 9: mod_base = OTHER; note = 2'-deoxy-2'-fluorouridine-3'-phosphate
  modified_base 10: mod_base = OTHER; note = 2'-O-methylcytidine-3'-phosphate
  modified_base 11: mod_base = OTHER; note = 2'-O-methylcytidine-3'-phosphate
  modified_base 12: mod_base = OTHER; note = 2'-O-methyluridine-3'-phosphate
  modified_base 13: mod_base = OTHER; note = 2'-O-methyladenosine-3'-phosphate
  modified_base 14: mod_base = OTHER; note = 2'-deoxy-2'-fluorouridine-3'-phosphate
  modified_base 15: mod_base = OTHER; note = 2'-O-methyladenosine-3'-phosphate
  modified_base 16: mod_base = OTHER; note = 2'-deoxy-2'-fluoroguanosine-3'-phosphate
  modified_base 17: mod_base = OTHER; note = 2'-O-methylcytidine-3'-phosphate
  modified_base 18: mod_base = OTHER; note = 2'-O-methylcytidine-3'-phosphate
  modified_base 19: mod_base = OTHER; note = 2'-O-methyluridine-3'-phosphate
  modified_base 20: mod_base = OTHER; note = 2'-O-methylcytidine-3'-phosphate
  modified_base 21: mod_base = OTHER; note = 2'-O-methylcytidine-3'-phosphorothioate
  modified_base 22: mod_base = OTHER; note = 2'-O-methyladenosine-3'-phosphorothioate
  modified_base 23: mod_base = OTHER; note = 2'-O-methyluridine
tcataagatcctatagcctccat

SEQ ID NO: 1605 - RNA, 23 nt, synthetic construct
  source 1..23: mol_type = other RNA
  modified_base 1: mod_base = OTHER; note = 2'-O-methyluridine-3'-phosphorothioate 5'-(E)-Vinylphosphonate
  modified_base 2: mod_base = OTHER; note = 2'-deoxy-2'-fluoroguanosine-3'-phosphorothioate
  modified_base 3: mod_base = OTHER; note = 2'-O-methyluridine-3'-phosphate
  modified_base 4: mod_base = OTHER; note = 2'-O-methyluridine-3'-phosphate
  modified_base 5: mod_base = OTHER; note = 2'-O-methyluridine-3'-phosphate
  modified_base 6: mod_base = OTHER; note = 2'-deoxy-2'-fluoroadenosine-3'-phosphate
  modified_base 7: mod_base = OTHER; note = 2'-O-methylcytidine-3'-phosphate
  modified_base 8: mod_base = OTHER; note = 2'-deoxy-2'-fluoroadenosine-3'-phosphate
  modified_base 9: mod_base = OTHER; note = 2'-deoxy-2'-fluorouridine-3'-phosphate
  modified_base 10: mod_base = OTHER; note = 2'-O-methyladenosine-3'-phosphate
  modified_base 11: mod_base = OTHER; note = 2'-O-methyladenosine-3'-phosphate
  modified_base 12: mod_base = OTHER; note = 2'-O-methylguanosine-3'-phosphate
  modified_base 13: mod_base = OTHER; note = 2'-O-methyladenosine-3'-phosphate
  modified_base 14: mod_base = OTHER; note = 2'-deoxy-2'-fluorouridine-3'-phosphate
  modified_base 15: mod_base = OTHER; note = 2'-O-methylcytidine-3'-phosphate
  modified_base 16: mod_base = OTHER; note = 2'-deoxy-2'-fluorocytidine-3'-phosphate
  modified_base 17: mod_base = OTHER; note = 2'-O-methyluridine-3'-phosphate
  modified_base 18: mod_base = OTHER; note = 2'-O-methyladenosine-3'-phosphate
  modified_base 19: mod_base = OTHER; note = 2'-O-methyluridine-3'-phosphate
  modified_base 20: mod_base = OTHER; note = 2'-O-methyladenosine-3'-phosphate
  modified_base 21: mod_base = OTHER; note = 2'-O-methylguanosine-3'-phosphorothioate
  modified_base 22: mod_base = OTHER; note = 2'-O-methylcytidine-3'-phosphorothioate
  modified_base 23: mod_base = OTHER; note = 2'-O-methylcytidine
tgtttacataagatcctatagcc

SEQ ID NO: 1606 - RNA, 23 nt, synthetic construct
  source 1..23: mol_type = other RNA
  modified_base 1: mod_base = OTHER; note = 2'-O-methyluridine-3'-phosphorothioate 5'-(E)-Vinylphosphonate
  modified_base 2: mod_base = OTHER; note = 2'-deoxy-2'-fluoroadenosine-3'-phosphorothioate
  modified_base 3: mod_base = OTHER; note = 2'-O-methyladenosine-3'-phosphate
  modified_base 4: mod_base = OTHER; note = 2'-O-methyladenosine-3'-phosphate
  modified_base 5: mod_base = OTHER; note = 2'-O-methylcytidine-3'-phosphate
  modified_base 6: mod_base = OTHER; note = 2'-deoxy-2'-fluorouridine-3'-phosphate
  modified_base 7: mod_base = OTHER; note = 2'-O-methylguanosine-3'-phosphate
  modified_base 8: mod_base = OTHER; note = 2'-deoxy-2'-fluorouridine-3'-phosphate
  modified_base 9: mod_base = OTHER; note = 2'-deoxy-2'-fluorouridine-3'-phosphate
  modified_base 10: mod_base = OTHER; note = 2'-O-methyluridine-3'-phosphate
  modified_base 11: mod_base = OTHER; note = 2'-O-methyladenosine-3'-phosphate
  modified_base 12: mod_base = OTHER; note = 2'-O-methylcytidine-3'-phosphate
  modified_base 13: mod_base = OTHER; note = 2'-O-methyladenosine-3'-phosphate
  modified_base 14: mod_base = OTHER; note = 2'-deoxy-2'-fluorouridine-3'-phosphate
  modified_base 15: mod_base = OTHER; note = 2'-O-methyladenosine-3'-phosphate
  modified_base 16: mod_base = OTHER; note = 2'-deoxy-2'-fluoroadenosine-3'-phosphate
  modified_base 17: mod_base = OTHER; note = 2'-O-methylguanosine-3'-phosphate
  modified_base 18: mod_base = OTHER; note = 2'-O-methyladenosine-3'-phosphate
  modified_base 19: mod_base = OTHER; note = 2'-O-methyluridine-3'-phosphate
  modified_base 20: mod_base = OTHER; note = 2'-O-methylcytidine-3'-phosphate
  modified_base 21: mod_base = OTHER; note = 2'-O-methylcytidine-3'-phosphorothioate
  modified_base 22: mod_base = OTHER; note = 2'-O-methyluridine-3'-phosphorothioate
  modified_base 23: mod_base = OTHER; note = 2'-O-methyladenosine
taaactgtttacataagatccta

SEQ ID NO: 1607 - RNA, 23 nt, synthetic construct
  source 1..23: mol_type = other RNA
  modified_base 1: mod_base = OTHER; note = 2'-O-methyluridine-3'-phosphorothioate 5'-(E)-Vinylphosphonate
  modified_base 2: mod_base = OTHER; note = 2'-deoxy-2'-fluoroadenosine-3'-phosphorothioate
  modified_base 3: mod_base = OTHER; note = 2'-O-methyluridine-3'-phosphate
  modified_base 4: mod_base = OTHER; note = 2'-O-methylcytidine-3'-phosphate
  modified_base 5: mod_base = OTHER; note = 2'-O-methyladenosine-3'-phosphate
  modified_base 6: mod_base = OTHER; note = 2'-deoxy-2'-fluoroguanosine-3'-phosphate
  modified_base 7: mod_base = OTHER; note = 2'-O-methyladenosine-3'-phosphate
  modified_base 8: mod_base = OTHER; note = 2'-deoxy-2'-fluoroadenosine-3'-phosphate
  modified_base 9: mod_base = OTHER; note = 2'-deoxy-2'-fluoroadenosine-3'-phosphate
  modified_base 10: mod_base = OTHER; note = 2'-O-methylcytidine-3'-phosphate
  modified_base 11: mod_base = OTHER; note = 2'-O-methyladenosine-3'-phosphate
  modified_base 12: mod_base = OTHER; note = 2'-O-methyladenosine-3'-phosphate
  modified_base 13: mod_base = OTHER; note = 2'-O-methyladenosine-3'-phosphate
  modified_base 14: mod_base = OTHER; note = 2'-deoxy-2'-fluoroadenosine-3'-phosphate
  modified_base 15: mod_base = OTHER; note = 2'-O-methyladenosine-3'-phosphate
  modified_base 16: mod_base = OTHER; note = 2'-deoxy-2'-fluorocytidine-3'-phosphate
  modified_base 17: mod_base = OTHER; note = 2'-O-methyluridine-3'-phosphate
  modified_base 18: mod_base = OTHER; note = 2'-O-methylguanosine-3'-phosphate
  modified_base 19: mod_base = OTHER; note = 2'-O-methyluridine-3'-phosphate
  modified_base 20: mod_base = OTHER; note = 2'-O-methyluridine-3'-phosphate
  modified_base 21: mod_base = OTHER; note = 2'-O-methyluridine-3'-phosphorothioate
  modified_base 22: mod_base = OTHER; note = 2'-O-methyladenosine-3'-phosphorothioate
  modified_base 23: mod_base = OTHER; note = 2'-O-methylcytidine
tatcagaaacaaaaactgtttac

SEQ ID NO: 1608 - RNA, 23 nt, synthetic construct
  source 1..23: mol_type = other RNA
  modified_base 1: mod_base = OTHER; note = 2'-O-methyluridine-3'-phosphorothioate 5'-(E)-Vinylphosphonate
  modified_base 2: mod_base = OTHER; note = 2'-deoxy-2'-fluorouridine-3'-phosphorothioate
  modified_base 3: mod_base = OTHER; note = 2'-O-methyluridine-3'-phosphate
  modified_base 4: mod_base = OTHER; note = 2'-O-methyladenosine-3'-phosphate
  modified_base 5: mod_base = OTHER; note = 2'-O-methylcytidine-3'-phosphate
  modified_base 6: mod_base = OTHER; note = 2'-deoxy-2'-fluorouridine-3'-phosphate
  modified_base 7: mod_base = OTHER; note = 2'-O-methyladenosine-3'-phosphate
  modified_base 8: mod_base = OTHER; note = 2'-deoxy-2'-fluorouridine-3'-phosphate
  modified_base 9: mod_base = OTHER; note = 2'-deoxy-2'-fluorocytidine-3'-phosphate
  modified_base 10: mod_base = OTHER; note = 2'-O-methyladenosine-3'-phosphate
  modified_base 11: mod_base = OTHER; note = 2'-O-methylguanosine-3'-phosphate
  modified_base 12: mod_base = OTHER; note = 2'-O-methyladenosine-3'-phosphate
  modified_base 13: mod_base = OTHER; note = 2'-O-methyladenosine-3'-phosphate
  modified_base 14: mod_base = OTHER; note = 2'-deoxy-2'-fluoroadenosine-3'-phosphate
  modified_base 15: mod_base = OTHER; note = 2'-O-methylcytidine-3'-phosphate
  modified_base 16: mod_base = OTHER; note = 2'-deoxy-2'-fluoroadenosine-3'-phosphate
  modified_base 17: mod_base = OTHER; note = 2'-O-methyladenosine-3'-phosphate
  modified_base 18: mod_base = OTHER; note = 2'-O-methyladenosine-3'-phosphate
  modified_base 19: mod_base = OTHER; note = 2'-O-methyladenosine-3'-phosphate
  modified_base 20: mod_base = OTHER; note = 2'-O-methyladenosine-3'-phosphate
  modified_base 21: mod_base = OTHER; note = 2'-O-methylcytidine-3'-phosphorothioate
  modified_base 22: mod_base = OTHER; note = 2'-O-methyluridine-3'-phosphorothioate
  modified_base 23: mod_base = OTHER; note = 2'-O-methylguanosine
tttactatcagaaacaaaaactg

SEQ ID NO: 1609 - RNA, 23 nt, synthetic construct
  source 1..23: mol_type = other RNA
  modified_base 1: mod_base = OTHER; note = 2'-O-methyluridine-3'-phosphorothioate 5'-(E)-Vinylphosphonate
  modified_base 2: mod_base = OTHER; note = 2'-deoxy-2'-fluoroguanosine-3'-phosphorothioate
  modified_base 3: mod_base = OTHER; note = 2'-O-methyluridine-3'-phosphate
  modified_base 4: mod_base = OTHER; note = 2'-O-methylcytidine-3'-phosphate
  modified_base 5: mod_base = OTHER; note = 2'-O-methylcytidine-3'-phosphate
  modified_base 6: mod_base = OTHER; note = 2'-deoxy-2'-fluoroadenosine-3'-phosphate
  modified_base 7: mod_base = OTHER; note = 2'-O-methyluridine-3'-phosphate
  modified_base 8: mod_base = OTHER; note = 2'-deoxy-2'-fluorouridine-3'-phosphate
  modified_base 9: mod_base = OTHER; note = 2'-deoxy-2'-fluoroadenosine-3'-phosphate
  modified_base 10: mod_base = OTHER; note = 2'-O-methylcytidine-3'-phosphate
  modified_base 11: mod_base = OTHER; note = 2'-O-methyluridine-3'-phosphate
  modified_base 12: mod_base = OTHER; note = 2'-O-methyladenosine-3'-phosphate
  modified_base 13: mod_base = OTHER; note = 2'-O-methyluridine-3'-phosphate
  modified_base 14: mod_base = OTHER; note = 2'-deoxy-2'-fluorocytidine-3'-phosphate
  modified_base 15: mod_base = OTHER; note = 2'-O-methyladenosine-3'-phosphate
  modified_base 16: mod_base = OTHER; note = 2'-deoxy-2'-fluoroguanosine-3'-phosphate
  modified_base 17: mod_base = OTHER; note = 2'-O-methyladenosine-3'-phosphate
  modified_base 18: mod_base = OTHER; note = 2'-O-methyladenosine-3'-phosphate
  modified_base 19: mod_base = OTHER; note = 2'-O-methyladenosine-3'-phosphate
  modified_base 20: mod_base = OTHER; note = 2'-O-methylcytidine-3'-phosphate
  modified_base 21: mod_base = OTHER; note = 2'-O-methyladenosine-3'-phosphorothioate
  modified_base 22: mod_base = OTHER; note = 2'-O-methyladenosine-3'-phosphorothioate
  modified_base 23: mod_base = OTHER; note = 2'-O-methyladenosine
tgtccattactatcagaaacaaa

SEQ ID NO: 1610 - RNA, 23 nt, synthetic construct
  source 1..23: mol_type = other RNA
  modified_base 1: mod_base = OTHER; note = 2'-O-methyluridine-3'-phosphorothioate 5'-(E)-Vinylphosphonate
  modified_base 2: mod_base = OTHER; note = 2'-deoxy-2'-fluoroadenosine-3'-phosphorothioate
  modified_base 3: mod_base = OTHER; note = 2'-O-methyluridine-3'-phosphate
  modified_base 4: mod_base = OTHER; note = 2'-O-methyladenosine-3'-phosphate
  modified_base 5: mod_base = OTHER; note = 2'-O-methyladenosine-3'-phosphate
  modified_base 6: mod_base = OTHER; note = 2'-deoxy-2'-fluoroadenosine-3'-phosphate
  modified_base 7: mod_base = OTHER; note = 2'-O-methylguanosine-3'-phosphate
  modified_base 8: mod_base = OTHER; note = 2'-deoxy-2'-fluorouridine-3'-phosphate
  modified_base 9: mod_base = OTHER; note = 2'-deoxy-2'-fluorocytidine-3'-phosphate
  modified_base 10: mod_base = OTHER; note = 2'-O-methylcytidine-3'-phosphate
  modified_base 11: mod_base = OTHER; note = 2'-O-methyladenosine-3'-phosphate
  modified_base 12: mod_base = OTHER; note = 2'-O-methyluridine-3'-phosphate
  modified_base 13: mod_base = OTHER; note = 2'-O-methyluridine-3'-phosphate
  modified_base 14: mod_base = OTHER; note = 2'-deoxy-2'-fluoroadenosine-3'-phosphate
  modified_base 15: mod_base = OTHER; note = 2'-O-methylcytidine-3'-phosphate
  modified_base 16: mod_base = OTHER; note = 2'-deoxy-2'-fluorouridine-3'-phosphate
  modified_base 17: mod_base = OTHER; note = 2'-O-methyladenosine-3'-phosphate
  modified_base 18: mod_base = OTHER; note = 2'-O-methyluridine-3'-phosphate
  modified_base 19: mod_base = OTHER; note = 2'-O-methylcytidine-3'-phosphate
  modified_base 20: mod_base = OTHER; note = 2'-O-methyladenosine-3'-phosphate
  modified_base 21: mod_base = OTHER; note = 2'-O-methylguanosine-3'-phosphorothioate
  modified_base 22: mod_base = OTHER; note = 2'-O-methyladenosine-3'-phosphorothioate
  modified_base 23: mod_base = OTHER; note = 2'-O-methyladenosine
tataaagtccattactatcagaa

SEQ ID NO: 1611 - RNA, 23 nt, synthetic construct
  source 1..23: mol_type = other RNA
  modified_base 1: mod_base = OTHER; note = 2'-O-methyluridine-3'-phosphorothioate 5'-(E)-Vinylphosphonate
  modified_base 2: mod_base = OTHER; note = 2'-deoxy-2'-fluoroadenosine-3'-phosphorothioate
  modified_base 3: mod_base = OTHER; note = 2'-O-methyladenosine-3'-phosphate
  modified_base 4: mod_base = OTHER; note = 2'-O-methylguanosine-3'-phosphate
  modified_base 5: mod_base = OTHER; note = 2'-O-methyluridine-3'-phosphate
  modified_base 6: mod_base = OTHER; note = 2'-deoxy-2'-fluorouridine-3'-phosphate
  modified_base 7: mod_base = OTHER; note = 2'-O-methyladenosine-3'-phosphate
  modified_base 8: mod_base = OTHER; note = 2'-deoxy-2'-fluoroguanosine-3'-phosphate
  modified_base 9: mod_base = OTHER; note = 2'-deoxy-2'-fluoroadenosine-3'-phosphate
  modified_base 10: mod_base = OTHER; note = 2'-O-methyladenosine-3'-phosphate
  modified_base 11: mod_base = OTHER; note = 2'-O-methyluridine-3'-phosphate
  modified_base 12: mod_base = OTHER; note = 2'-O-methyladenosine-3'-phosphate
  modified_base 13: mod_base = OTHER; note = 2'-O-methyladenosine-3'-phosphate
  modified_base 14: mod_base = OTHER; note = 2'-deoxy-2'-fluoroadenosine-3'-phosphate
  modified_base 15: mod_base = OTHER; note = 2'-O-methylguanosine-3'-phosphate
  modified_base 16: mod_base = OTHER; note = 2'-deoxy-2'-fluorouridine-3'-phosphate
  modified_base 17: mod_base = OTHER; note = 2'-O-methylcytidine-3'-phosphate
  modified_base 18: mod_base = OTHER; note = 2'-O-methylcytidine-3'-phosphate
  modified_base 19: mod_base = OTHER; note = 2'-O-methyladenosine-3'-phosphate
  modified_base 20: mod_base = OTHER; note = 2'-O-methyluridine-3'-phosphate
  modified_base 21: mod_base = OTHER; note = 2'-O-methyluridine-3'-phosphorothioate
  modified_base 22: mod_base = OTHER; note = 2'-O-methyladenosine-3'-phosphorothioate
  modified_base 23: mod_base = OTHER; note = 2'-O-methylcytidine
taagttagaataaagtccattac

SEQ ID NO: 1612 - RNA, 23 nt, synthetic construct
  source 1..23: mol_type = other RNA
  modified_base 1: mod_base = OTHER; note = 2'-O-methyluridine-3'-phosphorothioate 5'-(E)-Vinylphosphonate
  modified_base 2: mod_base = OTHER; note = 2'-deoxy-2'-fluorouridine-3'-phosphorothioate
  modified_base 3: mod_base = OTHER; note = 2'-O-methylguanosine-3'-phosphate
  modified_base 4: mod_base = OTHER; note = 2'-O-methyladenosine-3'-phosphate
  modified_base 5: mod_base = OTHER; note = 2'-O-methyluridine-3'-phosphate
  modified_base 6: mod_base = OTHER; note = 2'-deoxy-2'-fluorocytidine-3'-phosphate
  modified_base 7: mod_base = OTHER; note = 2'-O-methyluridine-3'-phosphate
  modified_base 8: mod_base = OTHER; note = 2'-deoxy-2'-fluorocytidine-3'-phosphate
  modified_base 9: mod_base = OTHER; note = 2'-deoxy-2'-fluoroadenosine-3'-phosphate
  modified_base 10: mod_base = OTHER; note = 2'-O-methyladenosine-3'-phosphate
  modified_base 11: mod_base = OTHER; note = 2'-O-methylguanosine-3'-phosphate
  modified_base 12: mod_base = OTHER; note = 2'-O-methyluridine-3'-phosphate
  modified_base 13: mod_base = OTHER; note = 2'-O-methyluridine-3'-phosphate
  modified_base 14: mod_base = OTHER; note = 2'-deoxy-2'-fluoroadenosine-3'-phosphate
  modified_base 15: mod_base = OTHER; note = 2'-O-methylguanosine-3'-phosphate
  modified_base 16: mod_base = OTHER; note = 2'-deoxy-2'-fluoroadenosine-3'-phosphate
  modified_base 17: mod_base = OTHER; note = 2'-O-methyladenosine-3'-phosphate
  modified_base 18: mod_base = OTHER; note = 2'-O-methyluridine-3'-phosphate
  modified_base 19: mod_base = OTHER; note = 2'-O-methyladenosine-3'-phosphate
  modified_base 20: mod_base = OTHER; note = 2'-O-methyladenosine-3'-phosphate
  modified_base 21: mod_base = OTHER; note = 2'-O-methyladenosine-3'-phosphorothioate
  modified_base 22: mod_base = OTHER; note = 2'-O-methylguanosine-3'-phosphorothioate
  modified_base 23: mod_base = OTHER; note = 2'-O-methyluridine
ttgatctcaagttagaataaagt

SEQ ID NO: 1613 - RNA, 23 nt, synthetic construct
  source 1..23: mol_type = other RNA
  modified_base 1: mod_base = OTHER; note = 2'-O-methyluridine-3'-phosphorothioate 5'-(E)-Vinylphosphonate
  modified_base 2: mod_base = OTHER; note = 2'-deoxy-2'-fluoroguanosine-3'-phosphorothioate
  modified_base 3: mod_base = OTHER; note = 2'-O-methylcytidine-3'-phosphate
  modified_base 4: mod_base = OTHER; note = 2'-O-methylcytidine-3'-phosphate
  modified_base 5: mod_base = OTHER; note = 2'-O-methyladenosine-3'-phosphate
  modified_base 6: mod_base = OTHER; note = 2'-deoxy-2'-fluorocytidine-3'-phosphate
  modified_base 7: mod_base = OTHER; note = 2'-O-methyluridine-3'-phosphate
  modified_base 8: mod_base = OTHER; note = 2'-deoxy-2'-fluoroguanosine-3'-phosphate
  modified_base 9: mod_base = OTHER; note = 2'-deoxy-2'-fluoroadenosine-3'-phosphate
  modified_base 10: mod_base = OTHER; note = 2'-O-methyluridine-3'-phosphate
  modified_base 11: mod_base = OTHER; note = 2'-O-methylcytidine-3'-phosphate
  modified_base 12: mod_base = OTHER; note = 2'-O-methyluridine-3'-phosphate
  modified_base 13: mod_base = OTHER; note = 2'-O-methylcytidine-3'-phosphate
  modified_base 14: mod_base = OTHER; note = 2'-deoxy-2'-fluoroadenosine-3'-phosphate
  modified_base 15: mod_base = OTHER; note = 2'-O-methyladenosine-3'-phosphate
  modified_base 16: mod_base = OTHER; note = 2'-deoxy-2'-fluoroguanosine-3'-phosphate
  modified_base 17: mod_base = OTHER; note = 2'-O-methyluridine-3'-phosphate
  modified_base 18: mod_base = OTHER; note = 2'-O-methyluridine-3'-phosphate
  modified_base 19: mod_base = OTHER; note = 2'-O-methyladenosine-3'-phosphate
  modified_base 20: mod_base = OTHER; note = 2'-O-methylguanosine-3'-phosphate
  modified_base 21: mod_base = OTHER; note = 2'-O-methyladenosine-3'-phosphorothioate
  modified_base 22: mod_base = OTHER; note = 2'-O-methyladenosine-3'-phosphorothioate
  modified_base 23: mod_base = OTHER; note = 2'-O-methyluridine
tgccactgatctcaagttagaat

SEQ ID NO: 1614 - RNA, 23 nt, synthetic construct
  source 1..23: mol_type = other RNA
  modified_base 1: mod_base = OTHER; note = 2'-O-methyluridine-3'-phosphorothioate 5'-(E)-Vinylphosphonate
  modified_base 2: mod_base = OTHER; note = 2'-deoxy-2'-fluorouridine-3'-phosphorothioate
  modified_base 3: mod_base = OTHER; note = 2'-O-methyluridine-3'-phosphate
  modified_base 4: mod_base = OTHER; note = 2'-O-methyluridine-3'-phosphate
  modified_base 5: mod_base = OTHER; note = 2'-O-methylguanosine-3'-phosphate
  modified_base 6: mod_base = OTHER; note = 2'-deoxy-2'-fluoroadenosine-3'-phosphate
  modified_base 7: mod_base = OTHER; note = 2'-O-methyluridine-3'-phosphate
  modified_base 8: mod_base = OTHER; note = 2'-deoxy-2'-fluorocytidine-3'-phosphate
  modified_base 9: mod_base = OTHER; note = 2'-deoxy-2'-fluorocytidine-3'-phosphate
  modified_base 10: mod_base = OTHER; note = 2'-O-methylguanosine-3'-phosphate
  modified_base 11: mod_base = OTHER; note = 2'-O-methylcytidine-3'-phosphate
  modified_base 12: mod_base = OTHER; note = 2'-O-methylcytidine-3'-phosphate
  modified_base 13: mod_base = OTHER; note = 2'-O-methyladenosine-3'-phosphate
  modified_base 14: mod_base = OTHER; note = 2'-deoxy-2'-fluorocytidine-3'-phosphate
  modified_base 15: mod_base = OTHER; note = 2'-O-methyluridine-3'-phosphate
  modified_base 16: mod_base = OTHER; note = 2'-deoxy-2'-fluoroguanosine-3'-phosphate
  modified_base 17: mod_base = OTHER; note = 2'-O-methyladenosine-3'-phosphate
  modified_base 18: mod_base = OTHER; note = 2'-O-methyluridine-3'-phosphate
  modified_base 19: mod_base = OTHER; note = 2'-O-methylcytidine-3'-phosphate
  modified_base 20: mod_base = OTHER; note = 2'-O-methyluridine-3'-phosphate
  modified_base 21: mod_base = OTHER; note = 2'-O-methylcytidine-3'-phosphorothioate
  modified_base 22: mod_base = OTHER; note = 2'-O-methyladenosine-3'-phosphorothioate
  modified_base 23: mod_base = OTHER; note = 2'-O-methyladenosine
ttttgatccgccactgatctcaa

SEQ ID NO: 1615 - RNA, 23 nt, synthetic construct
  source 1..23: mol_type = other RNA
  modified_base 1: mod_base = OTHER; note = 2'-O-methyluridine-3'-phosphorothioate 5'-(E)-Vinylphosphonate
  modified_base 2: mod_base = OTHER; note = 2'-deoxy-2'-fluorouridine-3'-phosphorothioate
  modified_base 3: mod_base = OTHER; note = 2'-O-methyladenosine-3'-phosphate
  modified_base 4: mod_base = OTHER; note = 2'-O-methylguanosine-3'-phosphate
  modified_base 5: mod_base = OTHER; note = 2'-O-methylguanosine-3'-phosphate
  modified_base 6: mod_base = OTHER; note = 2'-deoxy-2'-fluorouridine-3'-phosphate
  modified_base 7: mod_base = OTHER; note = 2'-O-methyluridine-3'-phosphate
  modified_base 8: mod_base = OTHER; note = 2'-deoxy-2'-fluorouridine-3'-phosphate
  modified_base 9: mod_base = OTHER; note = 2'-deoxy-2'-fluorouridine-3'-phosphate
  modified_base 10: mod_base = OTHER; note = 2'-O-methylguanosine-3'-phosphate
  modified_base 11: mod_base = OTHER; note = 2'-O-methyladenosine-3'-phosphate
  modified_base 12: mod_base = OTHER; note = 2'-O-methyluridine-3'-phosphate
  modified_base 13: mod_base = OTHER; note = 2'-O-methylcytidine-3'-phosphate
  modified_base 14: mod_base = OTHER; note = 2'-deoxy-2'-fluorocytidine-3'-phosphate
  modified_base 15: mod_base = OTHER; note = 2'-O-methylguanosine-3'-phosphate
  modified_base 16: mod_base = OTHER; note = 2'-deoxy-2'-fluorocytidine-3'-phosphate
  modified_base 17: mod_base = OTHER; note = 2'-O-methylcytidine-3'-phosphate
  modified_base 18: mod_base = OTHER; note = 2'-O-methyladenosine-3'-phosphate
  modified_base 19: mod_base = OTHER; note = 2'-O-methylcytidine-3'-phosphate
  modified_base 20: mod_base = OTHER; note = 2'-O-methyluridine-3'-phosphate
  modified_base 21: mod_base = OTHER; note = 2'-O-methylguanosine-3'-phosphorothioate
  modified_base 22: mod_base = OTHER; note = 2'-O-methyladenosine-3'-phosphorothioate
  modified_base 23: mod_base = OTHER; note = 2'-O-methyluridine
ttaggttttgatccgccactgat

SEQ ID NO: 1616 - RNA, 23 nt, synthetic construct
  source 1..23: mol_type = other RNA
  modified_base 1: mod_base = OTHER; note = 2'-O-methyluridine-3'-phosphorothioate 5'-(E)-Vinylphosphonate
  modified_base 2: mod_base = OTHER; note = 2'-deoxy-2'-fluoroadenosine-3'-phosphorothioate
  modified_base 3: mod_base = OTHER; note = 2'-O-methyladenosine-3'-phosphate
  modified_base 4: mod_base = OTHER; note = 2'-O-methyluridine-3'-phosphate
  modified_base 5: mod_base = OTHER; note = 2'-O-methylcytidine-3'-phosphate
  modified_base 6: mod_base = OTHER; note = 2'-deoxy-2'-fluorouridine-3'-phosphate
  modified_base 7: mod_base = OTHER; note = 2'-O-methyluridine-3'-phosphate
  modified_base 8: mod_base = OTHER; note = 2'-deoxy-2'-fluoroguanosine-3'-phosphate
  modified_base 9: mod_base = OTHER; note = 2'-deoxy-2'-fluorouridine-3'-phosphate
  modified_base 10: mod_base = OTHER; note = 2'-O-methyladenosine-3'-phosphate
  modified_base 11: mod_base = OTHER; note = 2'-O-methylguanosine-3'-phosphate
  modified_base 12: mod_base = OTHER; note = 2'-O-methylguanosine-3'-phosphate
  modified_base 13: mod_base = OTHER; note = 2'-O-methyluridine-3'-phosphate
  modified_base 14: mod_base = OTHER; note = 2'-deoxy-2'-fluorouridine-3'-phosphate
  modified_base 15: mod_base = OTHER; note = 2'-O-methyluridine-3'-phosphate
  modified_base 16: mod_base = OTHER; note = 2'-deoxy-2'-fluorouridine-3'-phosphate
  modified_base 17: mod_base = OTHER; note = 2'-O-methylguanosine-3'-phosphate
  modified_base 18: mod_base = OTHER; note = 2'-O-methyladenosine-3'-phosphate
  modified_base 19: mod_base = OTHER; note = 2'-O-methyluridine-3'-phosphate
  modified_base 20: mod_base = OTHER; note = 2'-O-methylcytidine-3'-phosphate
  modified_base 21: mod_base = OTHER; note = 2'-O-methylcytidine-3'-phosphorothioate
  modified_base 22: mod_base = OTHER; note = 2'-O-methylguanosine-3'-phosphorothioate
  modified_base 23: mod_base = OTHER; note = 2'-O-methylcytidine
taatcttgtaggttttgatccgc

SEQ ID NO: 1617 - RNA, 23 nt, synthetic construct
  source 1..23: mol_type = other RNA
  modified_base 1: mod_base = OTHER; note = 2'-O-methyluridine-3'-phosphorothioate 5'-(E)-Vinylphosphonate
  modified_base 2: mod_base = OTHER; note = 2'-deoxy-2'-fluoroadenosine-3'-phosphorothioate
  modified_base 3: mod_base = OTHER; note = 2'-O-methylguanosine-3'-phosphate
  modified_base 4: mod_base = OTHER; note = 2'-O-methyluridine-3'-phosphate
  modified_base 5: mod_base = OTHER; note = 2'-O-methyluridine-3'-phosphate
  modified_base 6: mod_base = OTHER; note = 2'-deoxy-2'-fluoroguanosine-3'-phosphate
  modified_base 7: mod_base = OTHER; note = 2'-O-methyladenosine-3'-phosphate
  modified_base 8: mod_base = OTHER; note = 2'-deoxy-2'-fluoroadenosine-3'-phosphate
  modified_base 9: mod_base = OTHER; note = 2'-deoxy-2'-fluorouridine-3'-phosphate
  modified_base 10: mod_base = OTHER; note = 2'-O-methylcytidine-3'-phosphate
  modified_base 11: mod_base = OTHER; note = 2'-O-methyluridine-3'-phosphate
  modified_base 12: mod_base = OTHER; note = 2'-O-methyluridine-3'-phosphate
  modified_base 13: mod_base = OTHER; note = 2'-O-methylguanosine-3'-phosphate
  modified_base 14: mod_base = OTHER; note = 2'-deoxy-2'-fluorouridine-3'-phosphate
  modified_base 15: mod_base = OTHER; note = 2'-O-methyladenosine-3'-phosphate
  modified_base 16: mod_base = OTHER; note = 2'-deoxy-2'-fluoroguanosine-3'-phosphate
  modified_base 17: mod_base = OTHER; note = 2'-O-methylguanosine-3'-phosphate
  modified_base 18: mod_base = OTHER; note = 2'-O-methyluridine-3'-phosphate
  modified_base 19: mod_base = OTHER; note = 2'-O-methyluridine-3'-phosphate
  modified_base 20: mod_base = OTHER; note = 2'-O-methyluridine-3'-phosphate
  modified_base 21: mod_base = OTHER; note = 2'-O-methyluridine-3'-phosphorothioate
  modified_base 22: mod_base = OTHER; note = 2'-O-methylguanosine-3'-phosphorothioate
  modified_base 23: mod_base = OTHER; note = 2'-O-methyladenosine
tagttgaatcttgtaggttttga

SEQ ID NO: 1618 - RNA, 23 nt, synthetic construct
  source 1..23: mol_type = other RNA
  modified_base 1: mod_base = OTHER; note = 2'-O-methyluridine-3'-phosphorothioate 5'-(E)-Vinylphosphonate
  modified_base 2: mod_base = OTHER; note = 2'-deoxy-2'-fluorouridine-3'-phosphorothioate
  modified_base 3: mod_base = OTHER; note = 2'-O-methyluridine-3'-phosphate
  modified_base 4: mod_base = OTHER; note = 2'-O-methyluridine-3'-phosphate
  modified_base 5: mod_base = OTHER; note = 2'-O-methyluridine-3'-phosphate
  modified_base 6: mod_base = OTHER; note = 2'-deoxy-2'-fluorocytidine-3'-phosphate
  modified_base 7: mod_base = OTHER; note = 2'-O-methyladenosine-3'-phosphate
  modified_base 8: mod_base = OTHER; note = 2'-deoxy-2'-fluoroguanosine-3'-phosphate
  modified_base 9: mod_base = OTHER; note = 2'-deoxy-2'-fluorouridine-3'-phosphate
  modified_base 10: mod_base = OTHER; note = 2'-O-methyluridine-3'-phosphate
  modified_base 11: mod_base = OTHER; note = 2'-O-methylguanosine-3'-phosphate
  modified_base 12: mod_base = OTHER; note = 2'-O-methyladenosine-3'-phosphate
  modified_base 13: mod_base = OTHER; note = 2'-O-methyladenosine-3'-phosphate
  modified_base 14: mod_base = OTHER; note = 2'-deoxy-2'-fluorouridine-3'-phosphate
  modified_base 15: mod_base = OTHER; note = 2'-O-methylcytidine-3'-phosphate
  modified_base 16: mod_base = OTHER; note = 2'-deoxy-2'-fluorouridine-3'-phosphate
  modified_base 17: mod_base = OTHER; note = 2'-O-methyluridine-3'-phosphate
  modified_base 18: mod_base = OTHER; note = 2'-O-methylguanosine-3'-phosphate
  modified_base 19: mod_base = OTHER; note = 2'-O-methyluridine-3'-phosphate
  modified_base 20: mod_base = OTHER; note = 2'-O-methyladenosine-3'-phosphate
  modified_base 21: mod_base = OTHER; note = 2'-O-methylguanosine-3'-phosphorothioate
  modified_base 22: mod_base = OTHER; note = 2'-O-methylguanosine-3'-phosphorothioate
  modified_base 23: mod_base = OTHER; note = 2'-O-methyluridine
tttttcagttgaatcttgtaggt

SEQ ID NO: 1619 - RNA, 23 nt, synthetic construct
  source 1..23: mol_type = other RNA
  modified_base 1: mod_base = OTHER; note = 2'-O-methyluridine-3'-phosphorothioate 5'-(E)-Vinylphosphonate
  modified_base 2: mod_base = OTHER; note = 2'-deoxy-2'-fluorocytidine-3'-phosphorothioate
  modified_base 3: mod_base = OTHER; note = 2'-O-methylcytidine-3'-phosphate
  modified_base 4: mod_base = OTHER; note = 2'-O-methyladenosine-3'-phosphate
  modified_base 5: mod_base = OTHER; note = 2'-O-methyladenosine-3'-phosphate
  modified_base 6: mod_base = OTHER; note = 2'-deoxy-2'-fluorocytidine-3'-phosphate
  modified_base 7: mod_base = OTHER; note = 2'-O-methyluridine-3'-phosphate
  modified_base 8: mod_base = OTHER; note = 2'-deoxy-2'-fluorouridine-3'-phosphate
  modified_base 9: mod_base = OTHER; note = 2'-deoxy-2'-fluorouridine-3'-phosphate
  modified_base 10: mod_base = OTHER; note = 2'-O-methyluridine-3'-phosphate
  modified_base 11: mod_base = OTHER; note = 2'-O-methylcytidine-3'-phosphate
  modified_base 12: mod_base = OTHER; note = 2'-O-methyladenosine-3'-phosphate
  modified_base 13: mod_base = OTHER; note = 2'-O-methylguanosine-3'-phosphate
  modified_base 14: mod_base = OTHER; note = 2'-deoxy-2'-fluorouridine-3'-phosphate
  modified_base 15: mod_base = OTHER; note = 2'-O-methyluridine-3'-phosphate
  modified_base 16: mod_base = OTHER; note = 2'-deoxy-2'-fluoroguanosine-3'-phosphate
  modified_base 17: mod_base = OTHER; note = 2'-O-methyladenosine-3'-phosphate
  modified_base 18: mod_base = OTHER; note = 2'-O-methyladenosine-3'-phosphate
  modified_base 19: mod_base = OTHER; note = 2'-O-methyluridine-3'-phosphate
  modified_base 20: mod_base = OTHER; note = 2'-O-methylcytidine-3'-phosphate
  modified_base 21: mod_base = OTHER; note = 2'-O-methyluridine-3'-phosphorothioate
  modified_base 22: mod_base = OTHER; note = 2'-O-methyluridine-3'-phosphorothioate
  modified_base 23: mod_base = OTHER; note = 2'-O-methylguanosine
tccaacttttcagttgaatcttg

SEQ ID NO: 1620 - RNA, 23 nt, synthetic construct
  source 1..23: mol_type = other RNA
  modified_base 1: mod_base = OTHER; note = 2'-O-methyluridine-3'-phosphorothioate 5'-(E)-Vinylphosphonate
  modified_base 2: mod_base = OTHER; note = 2'-deoxy-2'-fluorouridine-3'-phosphorothioate
  modified_base 3: mod_base = OTHER; note = 2'-O-methyladenosine-3'-phosphate
  modified_base 4: mod_base = OTHER; note = 2'-O-methyladenosine-3'-phosphate
  modified_base 5: mod_base = OTHER; note = 2'-O-methylcytidine-3'-phosphate
  modified_base 6: mod_base = OTHER; note = 2'-deoxy-2'-fluorouridine-3'-phosphate
  modified_base 7: mod_base = OTHER; note = 2'-O-methylguanosine-3'-phosphate
  modified_base 8: mod_base = OTHER; note = 2'-deoxy-2'-fluorocytidine-3'-phosphate
  modified_base 9: mod_base = OTHER; note = 2'-deoxy-2'-fluorocytidine-3'-phosphate
  modified_base 10: mod_base = OTHER; note = 2'-O-methyladenosine-3'-phosphate
  modified_base 11: mod_base = OTHER; note = 2'-O-methyladenosine-3'-phosphate
  modified_base 12: mod_base = OTHER; note = 2'-O-methylcytidine-3'-phosphate
  modified_base 13: mod_base = OTHER; note = 2'-O-methyluridine-3'-phosphate
  modified_base 14: mod_base = OTHER; note = 2'-deoxy-2'-fluorouridine-3'-phosphate
  modified_base 15: mod_base = OTHER; note = 2'-O-methyluridine-3'-phosphate
  modified_base 16: mod_base = OTHER; note = 2'-deoxy-2'-fluorouridine-3'-phosphate
  modified_base 17: mod_base = OTHER; note = 2'-O-methylcytidine-3'-phosphate
  modified_base 18: mod_base = OTHER; note = 2'-O-methyladenosine-3'-phosphate
  modified_base 19: mod_base = OTHER; note = 2'-O-methylguanosine-3'-phosphate
  modified_base 20: mod_base = OTHER; note = 2'-O-methyluridine-3'-phosphate
  modified_base 21: mod_base = OTHER; note = 2'-O-methyluridine-3'-phosphorothioate
  modified_base 22: mod_base = OTHER; note = 2'-O-methylguanosine-3'-phosphorothioate
  modified_base 23: mod_base = OTHER; note = 2'-O-methyladenosine
ttaactgccaacttttcagttga

SEQ ID NO: 1621 - RNA, 23 nt, synthetic construct
  source 1..23: mol_type = other RNA
  modified_base 1: mod_base = OTHER; note = 2'-O-methyluridine-3'-phosphorothioate 5'-(E)-Vinylphosphonate
  modified_base 2: mod_base = OTHER; note = 2'-deoxy-2'-fluoroadenosine-3'-phosphorothioate
  modified_base 3: mod_base = OTHER; note = 2'-O-methyladenosine-3'-phosphate
  modified_base 4: mod_base = OTHER; note = 2'-O-methyladenosine-3'-phosphate
  modified_base 5: mod_base = OTHER; note = 2'-O-methylcytidine-3'-phosphate
  modified_base 6: mod_base = OTHER; note = 2'-deoxy-2'-fluorocytidine-3'-phosphate
  modified_base 7: mod_base = OTHER; note = 2'-O-methyladenosine-3'-phosphate
  modified_base 8: mod_base = OTHER; note = 2'-deoxy-2'-fluorouridine-3'-phosphate
  modified_base 9: mod_base = OTHER; note = 2'-deoxy-2'-fluoroadenosine-3'-phosphate
  modified_base 10: mod_base = OTHER; note = 2'-O-methyladenosine-3'-phosphate
  modified_base 11: mod_base = OTHER; note = 2'-O-methylcytidine-3'-phosphate
  modified_base 12: mod_base = OTHER; note = 2'-O-methyluridine-3'-phosphate
  modified_base 13: mod_base = OTHER; note = 2'-O-methylguanosine-3'-phosphate
  modified_base 14: mod_base = OTHER; note = 2'-deoxy-2'-fluorocytidine-3'-phosphate
  modified_base 15: mod_base = OTHER; note = 2'-O-methylcytidine-3'-phosphate
  modified_base 16: mod_base = OTHER; note = 2'-deoxy-2'-fluoroadenosine-3'-phosphate
  modified_base 17: mod_base = OTHER; note = 2'-O-methyladenosine-3'-phosphate
  modified_base 18: mod_base = OTHER; note = 2'-O-methylcytidine-3'-phosphate
  modified_base 19: mod_base = OTHER; note = 2'-O-methyluridine-3'-phosphate
  modified_base 20: mod_base = OTHER; note = 2'-O-methyluridine-3'-phosphate
  modified_base 21: mod_base = OTHER; note = 2'-O-methyluridine-3'-phosphorothioate
  modified_base 22: mod_base = OTHER; note = 2'-O-methyluridine-3'-phosphorothioate
  modified_base 23: mod_base = OTHER; note = 2'-O-methylcytidine
taaaccataactgccaacttttc

SEQ ID NO: 1622 - RNA, 23 nt, synthetic construct
  source 1..23: mol_type = other RNA
  modified_base 1: mod_base = OTHER; note = 2'-O-methyluridine-3'-phosphorothioate 5'-(E)-Vinylphosphonate
  modified_base 2: mod_base = OTHER; note = 2'-deoxy-2'-fluoroadenosine-3'-phosphorothioate
  modified_base 3: mod_base = OTHER; note = 2'-O-methyladenosine-3'-phosphate
  modified_base 4: mod_base = OTHER; note = 2'-O-methyladenosine-3'-phosphate
  modified_base 5: mod_base = OTHER; note = 2'-O-methylguanosine-3'-phosphate
  modified_base 6: mod_base = OTHER; note = 2'-deoxy-2'-fluoroadenosine-3'-phosphate
  modified_base 7: mod_base = OTHER; note = 2'-O-methyladenosine-3'-phosphate
  modified_base 8: mod_base = OTHER; note = 2'-deoxy-2'-fluoroadenosine-3'-phosphate
  modified_base 9: mod_base = OTHER; note = 2'-deoxy-2'-fluoroadenosine-3'-phosphate
  modified_base 10: mod_base = OTHER; note = 2'-O-methylcytidine-3'-phosphate
  modified_base 11: mod_base = OTHER; note = 2'-O-methylcytidine-3'-phosphate
  modified_base 12: mod_base = OTHER; note = 2'-O-methyladenosine-3'-phosphate
  modified_base 13: mod_base = OTHER; note = 2'-O-methyluridine-3'-phosphate
  modified_base 14: mod_base = OTHER; note = 2'-deoxy-2'-fluoroadenosine-3'-phosphate
  modified_base 15: mod_base = OTHER; note = 2'-O-methyladenosine-3'-phosphate
  modified_base 16: mod_base = OTHER; note = 2'-deoxy-2'-fluorocytidine-3'-phosphate
  modified_base 17: mod_base = OTHER; note = 2'-O-methyluridine-3'-phosphate
  modified_base 18: mod_base = OTHER; note = 2'-O-methylguanosine-3'-phosphate
  modified_base 19: mod_base = OTHER; note = 2'-O-methylcytidine-3'-phosphate
  modified_base 20: mod_base = OTHER; note = 2'-O-methylcytidine-3'-phosphate
  modified_base 21: mod_base = OTHER; note = 2'-O-methyladenosine-3'-phosphorothioate
  modified_base 22: mod_base = OTHER; note = 2'-O-methyladenosine-3'-phosphorothioate
  modified_base 23: mod_base = OTHER; note = 2'-O-methylcytidine
taaagaaaaccataactgccaac

SEQ ID NO: 1623 - RNA, 23 nt, synthetic construct
  source 1..23: mol_type = other RNA
  modified_base 1: mod_base = OTHER; note = 2'-O-methyluridine-3'-phosphorothioate 5'-(E)-Vinylphosphonate
  modified_base 2: mod_base = OTHER; note = 2'-deoxy-2'-fluoroadenosine-3'-phosphorothioate
  modified_base 3: mod_base = OTHER; note = 2'-O-methylguanosine-3'-phosphate
  modified_base 4: mod_base = OTHER; note = 2'-O-methyladenosine-3'-phosphate
  modified_base 5: mod_base = OTHER; note = 2'-O-methyluridine-3'-phosphate
  modified_base 6: mod_base = OTHER; note = 2'-deoxy-2'-fluoroguanosine-3'-phosphate
  modified_base 7: mod_base = OTHER; note = 2'-O-methyladenosine-3'-phosphate
  modified_base 8: mod_base = OTHER; note = 2'-deoxy-2'-fluoroadenosine-3'-phosphate
  modified_base 9: mod_base = OTHER; note = 2'-deoxy-2'-fluoroadenosine-3'-phosphate
  modified_base 10: mod_base = OTHER; note = 2'-O-methylguanosine-3'-phosphate
  modified_base 11: mod_base = OTHER; note = 2'-O-methyladenosine-3'-phosphate
  modified_base 12: mod_base = OTHER; note = 2'-O-methyladenosine-3'-phosphate
  modified_base 13: mod_base = OTHER; note = 2'-O-methyladenosine-3'-phosphate
  modified_base 14: mod_base = OTHER; note = 2'-deoxy-2'-fluoroadenosine-3'-phosphate
  modified_base 15: mod_base = OTHER; note = 2'-O-methylcytidine-3'-phosphate
  modified_base 16: mod_base = OTHER; note = 2'-deoxy-2'-fluorocytidine-3'-phosphate
  modified_base 17: mod_base = OTHER; note = 2'-O-methyladenosine-3'-phosphate
  modified_base 18: mod_base = OTHER; note = 2'-O-methyluridine-3'-phosphate
  modified_base 19: mod_base = OTHER; note = 2'-O-methyladenosine-3'-phosphate
  modified_base 20: mod_base = OTHER; note = 2'-O-methyladenosine-3'-phosphate
  modified_base 21: mod_base = OTHER; note = 2'-O-methylcytidine-3'-phosphorothioate
  modified_base 22: mod_base = OTHER; note = 2'-O-methyluridine-3'-phosphorothioate
  modified_base 23: mod_base = OTHER; note = 2'-O-methylguanosine
tagatgaaagaaaaccataactg

SEQ ID NO: 1624 - RNA, 23 nt, synthetic construct
  source 1..23: mol_type = other RNA
  modified_base 1: mod_base = OTHER; note = 2'-O-methyluridine-3'-phosphorothioate 5'-(E)-Vinylphosphonate
  modified_base 2: mod_base = OTHER; note = 2'-deoxy-2'-fluorouridine-3'-phosphorothioate
  modified_base 3: mod_base = OTHER; note = 2'-O-methylguanosine-3'-phosphate
  modified_base 4: mod_base = OTHER; note = 2'-O-methyladenosine-3'-phosphate
  modified_base 5: mod_base = OTHER; note = 2'-O-methylcytidine-3'-phosphate
  modified_base 6: mod_base = OTHER; note = 2'-deoxy-2'-fluoroadenosine-3'-phosphate
  modified_base 7: mod_base = OTHER; note = 2'-O-methylcytidine-3'-phosphate
  modified_base 8: mod_base = OTHER; note = 2'-deoxy-2'-fluoroadenosine-3'-phosphate
  modified_base 9: mod_base = OTHER; note = 2'-deoxy-2'-fluorouridine-3'-phosphate
  modified_base 10: mod_base = OTHER; note = 2'-O-methylcytidine-3'-phosphate
  modified_base 11: mod_base = OTHER; note = 2'-O-methyladenosine-3'-phosphate
  modified_base 12: mod_base = OTHER; note = 2'-O-methylguanosine-3'-phosphate
  modified_base 13: mod_base = OTHER; note = 2'-O-methyladenosine-3'-phosphate
  modified_base 14: mod_base = OTHER; note = 2'-deoxy-2'-fluorouridine-3'-phosphate
  modified_base 15: mod_base = OTHER; note = 2'-O-methylguanosine-3'-phosphate
  modified_base 16: mod_base = OTHER; note = 2'-deoxy-2'-fluoroadenosine-3'-phosphate
  modified_base 17: mod_base = OTHER; note = 2'-O-methyladenosine-3'-phosphate
  modified_base 18: mod_base = OTHER; note = 2'-O-methyladenosine-3'-phosphate
  modified_base 19: mod_base = OTHER; note = 2'-O-methylguanosine-3'-phosphate
  modified_base 20: mod_base = OTHER; note = 2'-O-methyladenosine-3'-phosphate
  modified_base 21: mod_base = OTHER; note = 2'-O-methyladenosine-3'-phosphorothioate
  modified_base 22: mod_base = OTHER; note = 2'-O-methyladenosine-3'-phosphorothioate
  modified_base 23: mod_base = OTHER; note = 2'-O-methyladenosine
ttgacacatcagatgaaagaaaa

SEQ ID NO: 1625 - RNA, 23 nt, synthetic construct
  source 1..23: mol_type = other RNA
  modified_base 1: mod_base = OTHER; note = 2'-O-methyluridine-3'-phosphorothioate 5'-(E)-Vinylphosphonate
  modified_base 2: mod_base = OTHER; note = 2'-deoxy-2'-fluoroadenosine-3'-phosphorothioate
  modified_base 3: mod_base = OTHER; note = 2'-O-methylguanosine-3'-phosphate
  modified_base 4: mod_base = OTHER; note = 2'-O-methyladenosine-3'-phosphate
  modified_base 5: mod_base = OTHER; note = 2'-O-methyluridine-3'-phosphate
  modified_base 6: mod_base = OTHER; note = 2'-deoxy-2'-fluoroadenosine-3'-phosphate
  modified_base 7: mod_base = OTHER; note = 2'-O-methylcytidine-3'-phosphate
  modified_base 8: mod_base = OTHER; note = 2'-deoxy-2'-fluorouridine-3'-phosphate
  modified_base 9: mod_base = OTHER; note = 2'-deoxy-2'-fluoroguanosine-3'-phosphate
  modified_base 10: mod_base = OTHER; note = 2'-O-methyladenosine-3'-phosphate
  modified_base 11: mod_base = OTHER; note = 2'-O-methylcytidine-3'-phosphate
  modified_base 12: mod_base = OTHER; note = 2'-O-methyladenosine-3'-phosphate
  modified_base 13: mod_base = OTHER; note = 2'-O-methylcytidine-3'-phosphate
  modified_base 14: mod_base = OTHER; note = 2'-deoxy-2'-fluoroadenosine-3'-phosphate
  modified_base 15: mod_base = OTHER; note = 2'-O-methyluridine-3'-phosphate
  modified_base 16: mod_base = OTHER; note = 2'-deoxy-2'-fluorocytidine-3'-phosphate
  modified_base 17: mod_base = OTHER; note = 2'-O-methyladenosine-3'-phosphate
  modified_base 18: mod_base = OTHER; note = 2'-O-methylguanosine-3'-phosphate
  modified_base 19: mod_base = OTHER; note = 2'-O-methyladenosine-3'-phosphate
  modified_base 20: mod_base = OTHER; note = 2'-O-methyluridine-3'-phosphate
  modified_base 21: mod_base = OTHER; note = 2'-O-methylguanosine-3'-phosphorothioate
  modified_base 22: mod_base = OTHER; note = 2'-O-methyladenosine-3'-phosphorothioate
  modified_base 23: mod_base = OTHER; note = 2'-O-methyladenosine
tagatactgacacatcagatgaa

SEQ ID NO: 1626 - RNA, 23 nt, synthetic construct
  source 1..23: mol_type = other RNA
  modified_base 1: mod_base = OTHER; note = 2'-O-methyluridine-3'-phosphorothioate 5'-(E)-Vinylphosphonate
  modified_base 2: mod_base = OTHER; note = 2'-deoxy-2'-fluoroadenosine-3'-phosphorothioate
  modified_base 3: mod_base = OTHER; note = 2'-O-methyluridine-3'-phosphate
  modified_base 4: mod_base = OTHER; note = 2'-O-methylcytidine-3'-phosphate
  modified_base 5: mod_base = OTHER; note = 2'-O-methyladenosine-3'-phosphate
  modified_base 6: mod_base = OTHER; note = 2'-deoxy-2'-fluoroadenosine-3'-phosphate
  modified_base 7: mod_base = OTHER; note = 2'-O-methylcytidine-3'-phosphate
  modified_base 8: mod_base = OTHER; note = 2'-deoxy-2'-fluoroadenosine-3'-phosphate
  modified_base 9: mod_base = OTHER; note = 2'-deoxy-2'-fluoroguanosine-3'-phosphate
  modified_base 10: mod_base = OTHER; note = 2'-O-methyladenosine-3'-phosphate
  modified_base 11: mod_base = OTHER; note = 2'-O-methyluridine-3'-phosphate
  modified_base 12: mod_base = OTHER; note = 2'-O-methyladenosine-3'-phosphate
  modified_base 13: mod_base = OTHER; note = 2'-O-methylcytidine-3'-phosphate
  modified_base 14: mod_base = OTHER; note = 2'-deoxy-2'-fluorouridine-3'-phosphate
  modified_base 15: mod_base = OTHER; note = 2'-O-methylguanosine-3'-phosphate
  modified_base 16: mod_base = OTHER; note = 2'-deoxy-2'-fluoroadenosine-3'-phosphate
  modified_base 17: mod_base = OTHER; note = 2'-O-methylcytidine-3'-phosphate
  modified_base 18: mod_base = OTHER; note = 2'-O-methyladenosine-3'-phosphate
  modified_base 19: mod_base = OTHER; note = 2'-O-methylcytidine-3'-phosphate
  modified_base 20: mod_base = OTHER; note = 2'-O-methyladenosine-3'-phosphate
  modified_base 21: mod_base = OTHER; note = 2'-O-methyluridine-3'-phosphorothioate
  modified_base 22: mod_base = OTHER; note = 2'-O-methylcytidine-3'-phosphorothioate
  modified_base 23: mod_base = OTHER; note = 2'-O-methyladenosine
tatcaacagatactgacacatca

SEQ ID NO: 1627 - RNA, 23 nt, synthetic construct
  source 1..23: mol_type = other RNA
  modified_base 1: mod_base = OTHER; note = 2'-O-methyluridine-3'-phosphorothioate 5'-(E)-Vinylphosphonate
  modified_base 2: mod_base = OTHER; note = 2'-deoxy-2'-fluoroadenosine-3'-phosphorothioate
  modified_base 3: mod_base = OTHER; note = 2'-O-methyladenosine-3'-phosphate
  modified_base 4: mod_base = OTHER; note = 2'-O-methylguanosine-3'-phosphate
  modified_base 5: mod_base = OTHER; note = 2'-O-methylcytidine-3'-phosphate
  modified_base 6: mod_base = OTHER; note = 2'-deoxy-2'-fluoroadenosine-3'-phosphate
  modified_base 7: mod_base = OTHER; note = 2'-O-methyladenosine-3'-phosphate
  modified_base 8: mod_base = OTHER; note = 2'-deoxy-2'-fluoroadenosine-3'-phosphate
  modified_base 9: mod_base = OTHER; note = 2'-deoxy-2'-fluorouridine-3'-phosphate
  modified_base 10: mod_base = OTHER; note = 2'-O-methylcytidine-3'-phosphate
  modified_base 11: mod_base = OTHER; note = 2'-O-methyladenosine-3'-phosphate
  modified_base 12: mod_base = OTHER; note = 2'-O-methyladenosine-3'-phosphate
  modified_base 13: mod_base = OTHER; note = 2'-O-methylcytidine-3'-phosphate
  modified_base 14: mod_base = OTHER; note = 2'-deoxy-2'-fluoroadenosine-3'-phosphate
  modified_base 15: mod_base = OTHER; note = 2'-O-methylguanosine-3'-phosphate
  modified_base 16: mod_base = OTHER; note = 2'-deoxy-2'-fluoroadenosine-3'-phosphate
  modified_base 17: mod_base = OTHER; note = 2'-O-methyluridine-3'-phosphate
  modified_base 18: mod_base = OTHER; note = 2'-O-methyladenosine-3'-phosphate
  modified_base 19: mod_base = OTHER; note = 2'-O-methylcytidine-3'-phosphate
  modified_base 20: mod_base = OTHER; note = 2'-O-methyluridine-3'-phosphate
  modified_base 21: mod_base = OTHER; note = 2'-O-methylguanosine-3'-phosphorothioate
  modified_base 22: mod_base = OTHER; note = 2'-O-methyladenosine-3'-phosphorothioate
  modified_base 23: mod_base = OTHER; note = 2'-O-methylcytidine
taagcaaatcaacagatactgac

SEQ ID NO: 1628 - RNA, 23 nt, synthetic construct
  source 1..23: mol_type = other RNA
  modified_base 1: mod_base = OTHER; note = 2'-O-methyluridine-3'-phosphorothioate 5'-(E)-Vinylphosphonate
  modified_base 2: mod_base = OTHER; note = 2'-deoxy-2'-fluoroadenosine-3'-phosphorothioate
  modified_base 3: mod_base = OTHER; note = 2'-O-methyladenosine-3'-phosphate
  modified_base 4: mod_base = OTHER; note = 2'-O-methyladenosine-3'-phosphate
  modified_base 5: mod_base = OTHER; note = 2'-O-methylcytidine-3'-phosphate
  modified_base 6: mod_base = OTHER; note = 2'-deoxy-2'-fluorouridine-3'-phosphate
  modified_base 7: mod_base = OTHER; note = 2'-O-methyladenosine-3'-phosphate
  modified_base 8: mod_base = OTHER; note = 2'-deoxy-2'-fluorocytidine-3'-phosphate
  modified_base 9: mod_base = OTHER; note = 2'-deoxy-2'-fluoroadenosine-3'-phosphate
  modified_base 10: mod_base = OTHER; note = 2'-O-methyladenosine-3'-phosphate
  modified_base 11: mod_base = OTHER; note = 2'-O-methyladenosine-3'-phosphate
  modified_base 12: mod_base = OTHER; note = 2'-O-methylguanosine-3'-phosphate
  modified_base 13: mod_base = OTHER; note = 2'-O-methylcytidine-3'-phosphate
  modified_base 14: mod_base = OTHER; note = 2'-deoxy-2'-fluoroadenosine-3'-phosphate
  modified_base 15: mod_base = OTHER; note = 2'-O-methyladenosine-3'-phosphate
  modified_base 16: mod_base = OTHER; note = 2'-deoxy-2'-fluoroadenosine-3'-phosphate
  modified_base 17: mod_base = OTHER; note = 2'-O-methyluridine-3'-phosphate
  modified_base 18: mod_base = OTHER; note = 2'-O-methylcytidine-3'-phosphate
  modified_base 19: mod_base = OTHER; note = 2'-O-methyladenosine-3'-phosphate
  modified_base 20: mod_base = OTHER; note = 2'-O-methyladenosine-3'-phosphate
  modified_base 21: mod_base = OTHER; note = 2'-O-methylcytidine-3'-phosphorothioate
  modified_base 22: mod_base = OTHER; note = 2'-O-methyladenosine-3'-phosphorothioate
  modified_base 23: mod_base = OTHER; note = 2'-O-methylguanosine
taaactacaaagcaaatcaacag

SEQ ID NO: 1629 - RNA, 23 nt, synthetic construct
  source 1..23: mol_type = other RNA
  modified_base 1: mod_base = OTHER; note = 2'-O-methyluridine-3'-phosphorothioate 5'-(E)-Vinylphosphonate
  modified_base 2: mod_base = OTHER; note = 2'-deoxy-2'-fluoroadenosine-3'-phosphorothioate
  modified_base 3: mod_base = OTHER; note = 2'-O-methyluridine-3'-phosphate
  modified_base 4: mod_base = OTHER; note = 2'-O-methylguanosine-3'-phosphate
  modified_base 5: mod_base = OTHER; note = 2'-O-methyluridine-3'-phosphate
  modified_base 6: mod_base = OTHER; note = 2'-deoxy-2'-fluorocytidine-3'-phosphate
  modified_base 7: mod_base = OTHER; note = 2'-O-methyladenosine-3'-phosphate
  modified_base 8: mod_base = OTHER; note = 2'-deoxy-2'-fluoroadenosine-3'-phosphate
  modified_base 9: mod_base = OTHER; note = 2'-deoxy-2'-fluorocytidine-3'-phosphate
  modified_base 10: mod_base = OTHER; note = 2'-O-methyladenosine-3'-phosphate
  modified_base 11: mod_base = OTHER; note = 2'-O-methyladenosine-3'-phosphate
  modified_base 12: mod_base = OTHER; note = 2'-O-methyladenosine-3'-phosphate
  modified_base 13: mod_base = OTHER; note = 2'-O-methylcytidine-3'-phosphate
  modified_base 14: mod_base = OTHER; note = 2'-deoxy-2'-fluorouridine-3'-phosphate
  modified_base 15: mod_base = OTHER; note = 2'-O-methyladenosine-3'-phosphate
  modified_base 16: mod_base = OTHER; note = 2'-deoxy-2'-fluorocytidine-3'-phosphate
  modified_base 17: mod_base = OTHER; note = 2'-O-methyladenosine-3'-phosphate
  modified_base 18: mod_base = OTHER; note = 2'-O-methyladenosine-3'-phosphate
  modified_base 19: mod_base = OTHER; note = 2'-O-methyladenosine-3'-phosphate
  modified_base 20: mod_base = OTHER; note = 2'-O-methylguanosine-3'-phosphate
  modified_base 21: mod_base = OTHER; note = 2'-O-methylcytidine-3'-phosphorothioate
  modified_base 22: mod_base = OTHER; note = 2'-O-methyladenosine-3'-phosphorothioate
  modified_base 23: mod_base = OTHER; note = 2'-O-methyladenosine
tatgtcaacaaactacaaagcaa

SEQ ID NO: 1630 - RNA, 23 nt, synthetic construct
  source 1..23: mol_type = other RNA
  modified_base 1: mod_base = OTHER; note = 2'-O-methyluridine-3'-phosphorothioate 5'-(E)-Vinylphosphonate
  modified_base 2: mod_base = OTHER; note = 2'-deoxy-2'-fluorouridine-3'-phosphorothioate
  modified_base 3: mod_base = OTHER; note = 2'-O-methyluridine-3'-phosphate
  modified_base 4: mod_base = OTHER; note = 2'-O-methyladenosine-3'-phosphate
  modified_base 5: mod_base = OTHER; note = 2'-O-methyladenosine-3'-phosphate
  modified_base 6: mod_base = OTHER; note = 2'-deoxy-2'-fluoroguanosine-3'-phosphate
  modified_base 7: mod_base = OTHER; note = 2'-O-methyladenosine-3'-phosphate
  modified_base 8: mod_base = OTHER; note = 2'-deoxy-2'-fluorouridine-3'-phosphate
  modified_base 9: mod_base = OTHER; note = 2'-deoxy-2'-fluoroguanosine-3'-phosphate
  modified_base 10: mod_base = OTHER; note = 2'-O-methyluridine-3'-phosphate
  modified_base 11: mod_base = OTHER; note = 2'-O-methylcytidine-3'-phosphate
  modified_base 12: mod_base = OTHER; note = 2'-O-methyladenosine-3'-phosphate
  modified_base 13: mod_base = OTHER; note = 2'-O-methyladenosine-3'-phosphate
  modified_base 14: mod_base = OTHER; note = 2'-deoxy-2'-fluorocytidine-3'-phosphate
  modified_base 15: mod_base = OTHER; note = 2'-O-methyladenosine-3'-phosphate
  modified_base 16: mod_base = OTHER; note = 2'-deoxy-2'-fluoroadenosine-3'-phosphate
  modified_base 17: mod_base = OTHER; note = 2'-O-methyladenosine-3'-phosphate
  modified_base 18: mod_base = OTHER; note = 2'-O-methylcytidine-3'-phosphate
  modified_base 19: mod_base = OTHER; note = 2'-O-methyluridine-3'-phosphate
  modified_base 20: mod_base = OTHER; note = 2'-O-methyladenosine-3'-phosphate
  modified_base 21: mod_base = OTHER; note = 2'-O-methylcytidine-3'-phosphorothioate
  modified_base 22: mod_base = OTHER; note = 2'-O-methyladenosine-3'-phosphorothioate
  modified_base 23: mod_base = OTHER; note = 2'-O-methyladenosine
tttaagatgtcaacaaactacaa

SEQ ID NO: 1631 - RNA, 23 nt, synthetic construct
  source 1..23: mol_type = other RNA
  modified_base 1: mod_base = OTHER; note = 2'-O-methyluridine-3'-phosphorothioate 5'-(E)-Vinylphosphonate
  modified_base 2: mod_base = OTHER; note = 2'-deoxy-2'-fluoroadenosine-3'-phosphorothioate
  modified_base 3: mod_base = OTHER; note = 2'-O-methyladenosine-3'-phosphate
  modified_base 4: mod_base = OTHER; note = 2'-O-methyladenosine-3'-phosphate
  modified_base 5: mod_base = OTHER; note = 2'-O-methyluridine-3'-phosphate
  modified_base 6: mod_base = OTHER; note = 2'-deoxy-2'-fluorocytidine-3'-phosphate
  modified_base 7: mod_base = OTHER; note = 2'-O-methyluridine-3'-phosphate
  modified_base 8: mod_base = OTHER; note = 2'-deoxy-2'-fluorouridine-3'-phosphate
  modified_base 9: mod_base = OTHER; note = 2'-deoxy-2'-fluoroadenosine-3'-phosphate
  modified_base 10: mod_base = OTHER; note = 2'-O-methyladenosine-3'-phosphate
  modified_base 11: mod_base = OTHER; note = 2'-O-methylguanosine-3'-phosphate
  modified_base 12: mod_base = OTHER; note = 2'-O-methyladenosine-3'-phosphate
  modified_base 13: mod_base = OTHER; note = 2'-O-methyluridine-3'-phosphate
  modified_base 14: mod_base = OTHER; note = 2'-deoxy-2'-fluoroguanosine-3'-phosphate
  modified_base 15: mod_base = OTHER; note = 2'-O-methyluridine-3'-phosphate
  modified_base 16: mod_base = OTHER; note = 2'-deoxy-2'-fluorocytidine-3'-phosphate
  modified_base 17: mod_base = OTHER; note = 2'-O-methyladenosine-3'-phosphate
  modified_base 18: mod_base = OTHER; note = 2'-O-methyladenosine-3'-phosphate
  modified_base 19: mod_base = OTHER; note = 2'-O-methylcytidine-3'-phosphate
  modified_base 20: mod_base = OTHER; note = 2'-O-methyladenosine-3'-phosphate
  modified_base 21: mod_base = OTHER; note = 2'-O-methyladenosine-3'-phosphorothioate
  modified_base 22: mod_base = OTHER; note = 2'-O-methyladenosine-3'-phosphorothioate
  modified_base 23: mod_base = OTHER; note = 2'-O-methylcytidine
taaatcttaagatgtcaacaaac

SEQ ID NO: 1632 - RNA, 23 nt, synthetic construct
  source 1..23: mol_type = other RNA
  modified_base 1: mod_base = OTHER; note = 2'-O-methyluridine-3'-phosphorothioate 5'-(E)-Vinylphosphonate
  modified_base 2: mod_base = OTHER; note = 2'-deoxy-2'-fluoroadenosine-3'-phosphorothioate
  modified_base 3: mod_base = OTHER; note = 2'-O-methylcytidine-3'-phosphate
  modified_base 4: mod_base = OTHER; note = 2'-O-methyladenosine-3'-phosphate
  modified_base 5: mod_base = OTHER; note = 2'-O-methyluridine-3'-phosphate
  modified_base 6: mod_base = OTHER; note = 2'-deoxy-2'-fluorocytidine-3'-phosphate
  modified_base 7: mod_base = OTHER; note = 2'-O-methyladenosine-3'-phosphate
  modified_base 8: mod_base = OTHER; note = 2'-deoxy-2'-fluoroadenosine-3'-phosphate
  modified_base 9: mod_base = OTHER; note = 2'-deoxy-2'-fluoroadenosine-3'-phosphate
  modified_base 10: mod_base = OTHER; note = 2'-O-methyluridine-3'-phosphate
  modified_base 11: mod_base = OTHER; note = 2'-O-methylcytidine-3'-phosphate
  modified_base 12: mod_base = OTHER; note = 2'-O-methyluridine-3'-phosphate
  modified_base 13: mod_base = OTHER; note = 2'-O-methyluridine-3'-phosphate
  modified_base 14: mod_base = OTHER; note = 2'-deoxy-2'-fluoroadenosine-3'-phosphate
  modified_base 15: mod_base = OTHER; note = 2'-O-methyladenosine-3'-phosphate
  modified_base 16: mod_base = OTHER; note = 2'-deoxy-2'-fluoroguanosine-3'-phosphate
  modified_base 17: mod_base = OTHER; note = 2'-O-methyladenosine-3'-phosphate
  modified_base 18: mod_base = OTHER; note = 2'-O-methyluridine-3'-phosphate
  modified_base 19: mod_base = OTHER; note = 2'-O-methylguanosine-3'-phosphate
  modified_base 20: mod_base = OTHER; note = 2'-O-methyluridine-3'-phosphate
  modified_base 21: mod_base = OTHER; note = 2'-O-methylcytidine-3'-phosphorothioate
  modified_base 22: mod_base = OTHER; note = 2'-O-methyladenosine-3'-phosphorothioate
  modified_base 23: mod_base = OTHER; note = 2'-O-methyladenosine
tacatcaaatcttaagatgtcaa

SEQ ID NO: 1633 - RNA, 23 nt, synthetic construct
  source 1..23: mol_type = other RNA
  modified_base 1: mod_base = OTHER; note = 2'-O-methyluridine-3'-phosphorothioate 5'-(E)-Vinylphosphonate
  modified_base 2: mod_base = OTHER; note = 2'-deoxy-2'-fluoroadenosine-3'-phosphorothioate
  modified_base 3: mod_base = OTHER; note = 2'-O-methylcytidine-3'-phosphate
  modified_base 4: mod_base = OTHER; note = 2'-O-methyluridine-3'-phosphate
  modified_base 5: mod_base = OTHER; note = 2'-O-methyluridine-3'-phosphate
  modified_base 6: mod_base = OTHER; note = 2'-deoxy-2'-fluorouridine-3'-phosphate
  modified_base 7: mod_base = OTHER; note = 2'-O-methylcytidine-3'-phosphate
  modified_base 8: mod_base = OTHER; note = 2'-deoxy-2'-fluoroadenosine-3'-phosphate
  modified_base 9: mod_base = OTHER; note = 2'-deoxy-2'-fluorocytidine-3'-phosphate
  modified_base 10: mod_base = OTHER; note = 2'-O-methyladenosine-3'-phosphate
  modified_base 11: mod_base = OTHER; note = 2'-O-methyluridine-3'-phosphate
  modified_base 12: mod_base = OTHER; note = 2'-O-methylcytidine-3'-phosphate
  modified_base 13: mod_base = OTHER; note = 2'-O-methyladenosine-3'-phosphate
  modified_base 14: mod_base = OTHER; note = 2'-deoxy-2'-fluoroadenosine-3'-phosphate
  modified_base 15: mod_base = OTHER; note = 2'-O-methyladenosine-3'-phosphate
  modified_base 16: mod_base = OTHER; note = 2'-deoxy-2'-fluorouridine-3'-phosphate
  modified_base 17: mod_base = OTHER; note = 2'-O-methylcytidine-3'-phosphate
  modified_base 18: mod_base = OTHER; note = 2'-O-methyluridine-3'-phosphate
  modified_base 19: mod_base = OTHER; note = 2'-O-methyluridine-3'-phosphate
  modified_base 20: mod_base = OTHER; note = 2'-O-methyladenosine-3'-phosphate
  modified_base 21: mod_base = OTHER; note = 2'-O-methyladenosine-3'-phosphorothioate
  modified_base 22: mod_base = OTHER; note = 2'-O-methylguanosine-3'-phosphorothioate
  modified_base 23: mod_base = OTHER; note = 2'-O-methyladenosine
tactttcacatcaaatcttaaga

SEQ ID NO: 1634 - RNA, 23 nt, synthetic construct
  source 1..23: mol_type = other RNA
  modified_base 1: mod_base = OTHER; note = 2'-O-methyluridine-3'-phosphorothioate 5'-(E)-Vinylphosphonate
  modified_base 2: mod_base = OTHER; note = 2'-deoxy-2'-fluorouridine-3'-phosphorothioate
  modified_base 3: mod_base = OTHER; note = 2'-O-methylcytidine-3'-phosphate
  modified_base 4: mod_base = OTHER; note = 2'-O-methyluridine-3'-phosphate
  modified_base 5: mod_base = OTHER; note = 2'-O-methyladenosine-3'-phosphate
  modified_base 6: mod_base = OTHER; note = 2'-deoxy-2'-fluoroadenosine-3'-phosphate
  modified_base 7: mod_base = OTHER; note = 2'-O-methyladenosine-3'-phosphate
  modified_base 8: mod_base = OTHER; note = 2'-deoxy-2'-fluoroadenosine-3'-phosphate
  modified_base 9: mod_base = OTHER; note = 2'-deoxy-2'-fluorocytidine-3'-phosphate
  modified_base 10: mod_base = OTHER; note = 2'-O-methyluridine-3'-phosphate
  modified_base 11: mod_base = OTHER; note = 2'-O-methyluridine-3'-phosphate
  modified_base 12: mod_base = OTHER; note = 2'-O-methyluridine-3'-phosphate
  modified_base 13: mod_base = OTHER; note = 2'-O-methylcytidine-3'-phosphate
  modified_base 14: mod_base = OTHER; note = 2'-deoxy-2'-fluoroadenosine-3'-phosphate
  modified_base 15: mod_base = OTHER; note = 2'-O-methylcytidine-3'-phosphate
  modified_base 16: mod_base = OTHER; note = 2'-deoxy-2'-fluoroadenosine-3'-phosphate
  modified_base 17: mod_base = OTHER; note = 2'-O-methyluridine-3'-phosphate
  modified_base 18: mod_base = OTHER; note = 2'-O-methylcytidine-3'-phosphate
  modified_base 19: mod_base = OTHER; note = 2'-O-methyladenosine-3'-phosphate
  modified_base 20: mod_base = OTHER; note = 2'-O-methyladenosine-3'-phosphate
  modified_base 21: mod_base = OTHER; note = 2'-O-methyladenosine-3'-phosphorothioate
  modified_base 22: mod_base = OTHER; note = 2'-O-methyluridine-3'-phosphorothioate
  modified_base 23: mod_base = OTHER; note = 2'-O-methylcytidine
ttctaaaactttcacatcaaatc

SEQ ID NO: 1635 - RNA, 21 nt, synthetic construct
  source 1..21: mol_type = other RNA
  modified_base 1: mod_base = OTHER; note = 2'-O-methyladenosine-3'-phosphorothioate
  modified_base 2: mod_base = OTHER; note = 2'-O-methyluridine-3'-phosphorothioate
  modified_base 3: mod_base = OTHER; note = 2'-O-methylguanosine-3'-phosphate
  modified_base 4: mod_base = OTHER; note = 2'-O-methylguanosine-3'-phosphate
  modified_base 5: mod_base = OTHER; note = 2'-O-methylcytidine-3'-phosphate
  modified_base 6: mod_base = OTHER; note = 2'-O-methylguanosine-3'-phosphate
  modified_base 7: mod_base = OTHER; note = 2'-deoxy-2'-fluoroadenosine-3'-phosphate
  modified_base 8: mod_base = OTHER; note = 2'-O-methyluridine-3'-phosphate
  modified_base 9: mod_base = OTHER; note = 2'-deoxy-2'-fluoroguanosine-3'-phosphate
  modified_base 10: mod_base = OTHER; note = 2'-deoxy-2'-fluoroadenosine-3'-phosphate
  modified_base 11: mod_base = OTHER; note = 2'-deoxy-2'-fluorouridine-3'-phosphate
  modified_base 12: mod_base = OTHER; note = 2'-O-methylguanosine-3'-phosphate
  modified_base 13: mod_base = OTHER; note = 2'-O-methylcytidine-3'-phosphate
  modified_base 14: mod_base = OTHER; note = 2'-O-methylcytidine-3'-phosphate
  modified_base 15: mod_base = OTHER; note = 2'-O-methyluridine-3'-phosphate
  modified_base 16: mod_base = OTHER; note = 2'-O-methylcytidine-3'-phosphate
  modified_base 17: mod_base = OTHER; note = 2'-O-methyluridine-3'-phosphate
  modified_base 18: mod_base = OTHER; note = 2'-O-methyladenosine-3'-phosphate
  modified_base 19: mod_base = OTHER; note = 2'-O-methylguanosine-3'-phosphate
  modified_base 20: mod_base = OTHER; note = 2'-O-methyluridine-3'-phosphate
  modified_base 21: mod_base = OTHER; note = 2'-O-methyluridine-3'-phosphate ((2S,4R)-1-[29-[[2-(acetylamino)-2-deoxy-beta-D-galactopyra nosyl]oxy]-14,14-bis[[3-[[3-[[5-[[2-(acetylamino)-2-deoxy-b eta-D-galactopyranosyl]oxy]-1-oxopentyl]amino]propyl]amino] -3-oxopropoxy]methyl]-1,12,19,25-tetraoxo-16-oxa-13,20,24-t riazanonacos-1-yl]-4-hydroxy-2-pyrrolidinyl)methyl ester
atggcgatgatgcctctagtt

SEQ ID NO: 1636 - RNA, 21 nt, synthetic construct
  source 1..21: mol_type = other RNA
  modified_base 1: mod_base = OTHER; note = 2'-O-methyluridine-3'-phosphorothioate
  modified_base 2: mod_base = OTHER; note = 2'-O-methylguanosine-3'-phosphorothioate
  modified_base 3: mod_base = OTHER; note = 2'-O-methyladenosine-3'-phosphate
  modified_base 4: mod_base = OTHER; note = 2'-O-methyluridine-3'-phosphate
  modified_base 5: mod_base = OTHER; note = 2'-O-methylguanosine-3'-phosphate
  modified_base 6: mod_base = OTHER; note = 2'-O-methylcytidine-3'-phosphate
  modified_base 7: mod_base = OTHER; note = 2'-deoxy-2'-fluorocytidine-3'-phosphate
  modified_base 8: mod_base = OTHER; note = 2'-O-methyluridine-3'-phosphate
  modified_base 9: mod_base = OTHER; note = 2'-deoxy-2'-fluorocytidine-3'-phosphate
  modified_base 10: mod_base = OTHER; note = 2'-deoxy-2'-fluorouridine-3'-phosphate
  modified_base 11: mod_base = OTHER; note = 2'-deoxy-2'-fluoroadenosine-3'-phosphate
  modified_base 12: mod_base = OTHER; note = 2'-O-methylguanosine-3'-phosphate
  modified_base 13: mod_base = OTHER; note = 2'-O-methyluridine-3'-phosphate
  modified_base 14: mod_base = OTHER; note = 2'-O-methylcytidine-3'-phosphate
  modified_base 15: mod_base = OTHER; note = 2'-O-methylcytidine-3'-phosphate
  modified_base 16: mod_base = OTHER; note = 2'-O-methyluridine-3'-phosphate
  modified_base 17: mod_base = OTHER; note = 2'-O-methylguanosine-3'-phosphate
  modified_base 18: mod_base = OTHER; note = 2'-O-methylcytidine-3'-phosphate
  modified_base 19: mod_base = OTHER; note = 2'-O-methyladenosine-3'-phosphate
  modified_base 20: mod_base = OTHER; note = 2'-O-methyluridine-3'-phosphate
  modified_base 21: mod_base = OTHER; note = 2'-O-methyluridine-3'-phosphate ((2S,4R)-1-[29-[[2-(acetylamino)-2-deoxy-beta-D-galactopyra nosyl]oxy]-14,14-bis[[3-[[3-[[5-[[2-(acetylamino)-2-deoxy-b eta-D-galactopyranosyl]oxy]-1-oxopentyl]amino]propyl]amino] -3-oxopropoxy]methyl]-1,12,19,25-tetraoxo-16-oxa-13,20,24-t riazanonacos-1-yl]-4-hydroxy-2-pyrrolidinyl)methyl ester
tgatgcctctagtcctgcatt

SEQ ID NO: 1637 - RNA, 21 nt, synthetic construct
  source 1..21: mol_type = other RNA
  modified_base 1: mod_base = OTHER; note = 2'-O-methylcytidine-3'-phosphorothioate
  modified_base 2: mod_base = OTHER; note = 2'-O-methylcytidine-3'-phosphorothioate
  modified_base 3: mod_base = OTHER; note = 2'-O-methyluridine-3'-phosphate
  modified_base 4: mod_base = OTHER; note = 2'-O-methylcytidine-3'-phosphate
  modified_base 5: mod_base = OTHER; note = 2'-O-methyluridine-3'-phosphate
  modified_base 6: mod_base = OTHER; note = 2'-O-methyladenosine-3'-phosphate
  modified_base 7: mod_base = OTHER; note = 2'-deoxy-2'-fluoroguanosine-3'-phosphate
  modified_base 8: mod_base = OTHER; note = 2'-O-methyluridine-3'-phosphate
  modified_base 9: mod_base = OTHER; note = 2'-deoxy-2'-fluorocytidine-3'-phosphate
  modified_base 10: mod_base = OTHER; note = 2'-deoxy-2'-fluorocytidine-3'-phosphate
  modified_base 11: mod_base = OTHER; note = 2'-deoxy-2'-fluorouridine-3'-phosphate
  modified_base 12: mod_base = OTHER; note = 2'-O-methylguanosine-3'-phosphate
  modified_base 13: mod_base = OTHER; note = 2'-O-methylcytidine-3'-phosphate
  modified_base 14: mod_base = OTHER; note = 2'-O-methyladenosine-3'-phosphate
  modified_base 15: mod_base = OTHER; note = 2'-O-methyluridine-3'-phosphate
  modified_base 16: mod_base = OTHER; note = 2'-O-methylcytidine-3'-phosphate
  modified_base 17: mod_base = OTHER; note = 2'-O-methyladenosine-3'-phosphate
  modified_base 18: mod_base = OTHER; note = 2'-O-methyluridine-3'-phosphate
  modified_base 19: mod_base = OTHER; note = 2'-O-methylcytidine-3'-phosphate
  modified_base 20: mod_base = OTHER; note = 2'-O-methylcytidine-3'-phosphate
  modified_base 21: mod_base = OTHER; note = 2'-O-methyluridine-3'-phosphate ((2S,4R)-1-[29-[[2-(acetylamino)-2-deoxy-beta-D-galactopyra nosyl]oxy]-14,14-bis[[3-[[3-[[5-[[2-(acetylamino)-2-deoxy-b eta-D-galactopyranosyl]oxy]-1-oxopentyl]amino]propyl]amino] -3-oxopropoxy]methyl]-1,12,19,25-tetraoxo-16-oxa-13,20,24-t riazanonacos-1-yl]-4-hydroxy-2-pyrrolidinyl)methyl ester
cctctagtcctgcatcatcct

SEQ ID NO: 1638 - RNA, 21 nt, synthetic construct
  source 1..21: mol_type = other RNA
  modified_base 1: mod_base = OTHER; note = 2'-O-methylguanosine-3'-phosphorothioate
  modified_base 2: mod_base = OTHER; note = 2'-O-methyluridine-3'-phosphorothioate
  modified_base 3: mod_base = OTHER; note = 2'-O-methylcytidine-3'-phosphate
  modified_base 4: mod_base = OTHER; note = 2'-O-methylcytidine-3'-phosphate
  modified_base 5: mod_base = OTHER; note = 2'-O-methyluridine-3'-phosphate
  modified_base 6: mod_base = OTHER; note = 2'-O-methylguanosine-3'-phosphate
  modified_base 7: mod_base = OTHER; note = 2'-deoxy-2'-fluorocytidine-3'-phosphate
  modified_base 8: mod_base = OTHER; note = 2'-O-methyladenosine-3'-phosphate
  modified_base 9: mod_base = OTHER; note = 2'-deoxy-2'-fluorouridine-3'-phosphate
  modified_base 10: mod_base = OTHER; note = 2'-deoxy-2'-fluorocytidine-3'-phosphate
  modified_base 11: mod_base = OTHER; note = 2'-deoxy-2'-fluoroadenosine-3'-phosphate
  modified_base 12: mod_base = OTHER; note = 2'-O-methyluridine-3'-phosphate
  modified_base 13: mod_base = OTHER; note = 2'-O-methylcytidine-3'-phosphate
  modified_base 14: mod_base = OTHER; note = 2'-O-methylcytidine-3'-phosphate
  modified_base 15: mod_base = OTHER; note = 2'-O-methyladenosine-3'-phosphate
  modified_base 16: mod_base = OTHER; note = 2'-O-methylguanosine-3'-phosphate
  modified_base 17: mod_base = OTHER; note = 2'-O-methyladenosine-3'-phosphate
  modified_base 18: mod_base = OTHER; note = 2'-O-methylguanosine-3'-phosphate
  modified_base 19: mod_base = OTHER; note = 2'-O-methylcytidine-3'-phosphate
  modified_base 20: mod_base = OTHER; note = 2'-O-methylguanosine-3'-phosphate
  modified_base 21: mod_base = OTHER; note = 2'-O-methyluridine-3'-phosphate ((2S,4R)-1-[29-[[2-(acetylamino)-2-deoxy-beta-D-galactopyra nosyl]oxy]-14,14-bis[[3-[[3-[[5-[[2-(acetylamino)-2-deoxy-b eta-D-galactopyranosyl]oxy]-1-oxopentyl]amino]propyl]amino] -3-oxopropoxy]methyl]-1,12,19,25-tetraoxo-16-oxa-13,20,24-t riazanonacos-1-yl]-4-hydroxy-2-pyrrolidinyl)methyl ester
gtcctgcatcatccagagcgt

SEQ ID NO: 1639 - RNA, 21 nt, synthetic construct
  source 1..21: mol_type = other RNA
  modified_base 1: mod_base = OTHER; note = 2'-O-methylcytidine-3'-phosphorothioate
  modified_base 2: mod_base = OTHER; note = 2'-O-methylcytidine-3'-phosphorothioate
  modified_base 3: mod_base = OTHER; note = 2'-O-methylguanosine-3'-phosphate
  modified_base 4: mod_base = OTHER; note = 2'-O-methylguanosine-3'-phosphate
  modified_base 5: mod_base = OTHER; note = 2'-O-methyladenosine-3'-phosphate
  modified_base 6: mod_base = OTHER; note = 2'-O-methylcytidine-3'-phosphate
  modified_base 7: mod_base = OTHER; note = 2'-deoxy-2'-fluorouridine-3'-phosphate
  modified_base 8: mod_base = OTHER; note = 2'-O-methylguanosine-3'-phosphate
  modified_base 9: mod_base = OTHER; note = 2'-deoxy-2'-fluorocytidine-3'-phosphate
  modified_base 10: mod_base = OTHER; note = 2'-deoxy-2'-fluoroguanosine-3'-phosphate
  modified_base 11: mod_base = OTHER; note = 2'-deoxy-2'-fluoroadenosine-3'-phosphate
  modified_base 12: mod_base = OTHER; note = 2'-O-methylguanosine-3'-phosphate
  modified_base 13: mod_base = OTHER; note = 2'-O-methyladenosine-3'-phosphate
  modified_base 14: mod_base = OTHER; note = 2'-O-methyluridine-3'-phosphate
  modified_base 15: mod_base = OTHER; note = 2'-O-methylguanosine-3'-phosphate
  modified_base 16: mod_base = OTHER; note = 2'-O-methylguanosine-3'-phosphate
  modified_base 17: mod_base = OTHER; note = 2'-O-methyladenosine-3'-phosphate
  modified_base 18: mod_base = OTHER; note = 2'-O-methylguanosine-3'-phosphate
  modified_base 19: mod_base = OTHER; note = 2'-O-methylguanosine-3'-phosphate
  modified_base 20: mod_base = OTHER; note = 2'-O-methyladenosine-3'-phosphate
  modified_base 21: mod_base = OTHER; note = 2'-O-methyluridine-3'-phosphate ((2S,4R)-1-[29-[[2-(acetylamino)-2-deoxy-beta-D-galactopyra nosyl]oxy]-14,14-bis[[3-[[3-[[5-[[2-(acetylamino)-2-deoxy-b eta-D-galactopyranosyl]oxy]-1-oxopentyl]amino]propyl]amino] -3-oxopropoxy]methyl]-1,12,19,25-tetraoxo-16-oxa-13,20,24-t riazanonacos-1-yl]-4-hydroxy-2-pyrrolidinyl)methyl ester
ccggactgcgagatggaggat

SEQ ID NO: 1640 - RNA, 21 nt, synthetic construct
  source 1..21: mol_type = other RNA
  modified_base 1: mod_base = OTHER; note = 2'-O-methylcytidine-3'-phosphorothioate
  modified_base 2: mod_base = OTHER; note = 2'-O-methyladenosine-3'-phosphorothioate
  modified_base 3: mod_base = OTHER; note = 2'-O-methylcytidine-3'-phosphate
  modified_base 4: mod_base = OTHER; note = 2'-O-methylcytidine-3'-phosphate
  modified_base 5: mod_base = OTHER; note = 2'-O-methylcytidine-3'-phosphate
  modified_base 6: mod_base = OTHER; note = 2'-O-methylguanosine-3'-phosphate
  modified_base 7: mod_base = OTHER; note = 2'-deoxy-2'-fluoroguanosine-3'-phosphate
  modified_base 8: mod_base = OTHER; note = 2'-O-methylcytidine-3'-phosphate
  modified_base 9: mod_base = OTHER; note = 2'-deoxy-2'-fluoroadenosine-3'-phosphate
  modified_base 10: mod_base = OTHER; note = 2'-deoxy-2'-fluoroguanosine-3'-phosphate
  modified_base 11: mod_base = OTHER; note = 2'-deoxy-2'-fluoroguanosine-3'-phosphate
  modified_base 12: mod_base = OTHER; note = 2'-O-methylcytidine-3'-phosphate
  modified_base 13: mod_base = OTHER; note = 2'-O-methyluridine-3'-phosphate
  modified_base 14: mod_base = OTHER; note = 2'-O-methyluridine-3'-phosphate
  modified_base 15: mod_base = OTHER; note = 2'-O-methyladenosine-3'-phosphate
  modified_base 16: mod_base = OTHER; note = 2'-O-methyluridine-3'-phosphate
  modified_base 17: mod_base = OTHER; note = 2'-O-methylcytidine-3'-phosphate
  modified_base 18: mod_base = OTHER; note = 2'-O-methyluridine-3'-phosphate
  modified_base 19: mod_base = OTHER; note = 2'-O-methylguanosine-3'-phosphate
  modified_base 20: mod_base = OTHER; note = 2'-O-methyluridine-3'-phosphate
  modified_base 21: mod_base = OTHER; note = 2'-O-methyluridine-3'-phosphate ((2S,4R)-1-[29-[[2-(acetylamino)-2-deoxy-beta-D-galactopyra nosyl]oxy]-14,14-bis[[3-[[3-[[5-[[2-(acetylamino)-2-deoxy-b eta-D-galactopyranosyl]oxy]-1-oxopentyl]amino]propyl]amino] -3-oxopropoxy]methyl]-1,12,19,25-tetraoxo-16-oxa-13,20,24-t riazanonacos-1-yl]-4-hydroxy-2-pyrrolidinyl)methyl ester
cacccggcaggcttatctgtt

SEQ ID NO: 1641 - RNA, 21 nt, synthetic construct
  source 1..21: mol_type = other RNA
  modified_base 1: mod_base = OTHER; note = 2'-O-methylguanosine-3'-phosphorothioate
  modified_base 2: mod_base = OTHER; note = 2'-O-methylguanosine-3'-phosphorothioate
  modified_base 3: mod_base = OTHER; note = 2'-O-methylcytidine-3'-phosphate
  modified_base 4: mod_base = OTHER; note = 2'-O-methyladenosine-3'-phosphate
  modified_base 5: mod_base = OTHER; note = 2'-O-methylguanosine-3'-phosphate
  modified_base 6: mod_base = OTHER; note = 2'-O-methylguanosine-3'-phosphate
  modified_base 7: mod_base = OTHER; note = 2'-deoxy-2'-fluorocytidine-3'-phosphate
  modified_base 8: mod_base = OTHER; note = 2'-O-methyluridine-3'-phosphate
  modified_base 9: mod_base = OTHER; note = 2'-deoxy-2'-fluorouridine-3'-phosphate
  modified_base 10: mod_base = OTHER; note = 2'-deoxy-2'-fluoroadenosine-3'-phosphate
  modified_base 11: mod_base = OTHER; note = 2'-deoxy-2'-fluorouridine-3'-phosphate
  modified_base 12: mod_base = OTHER; note = 2'-O-methylcytidine-3'-phosphate
  modified_base 13: mod_base = OTHER; note = 2'-O-methyluridine-3'-phosphate
  modified_base 14: mod_base = OTHER; note = 2'-O-methylguanosine-3'-phosphate
  modified_base 15: mod_base = OTHER; note = 2'-O-methyluridine-3'-phosphate
  modified_base 16: mod_base = OTHER; note = 2'-O-methylcytidine-3'-phosphate
  modified_base 17: mod_base = OTHER; note = 2'-O-methyluridine-3'-phosphate
  modified_base 18: mod_base = OTHER; note = 2'-O-methyluridine-3'-phosphate
  modified_base 19: mod_base = OTHER; note = 2'-O-methylguanosine-3'-phosphate
  modified_base 20: mod_base = OTHER; note = 2'-O-methylguanosine-3'-phosphate
  modified_base 21: mod_base = OTHER; note = 2'-O-methyluridine-3'-phosphate ((2S,4R)-1-[29-[[2-(acetylamino)-2-deoxy-beta-D-galactopyra nosyl]oxy]-14,14-bis[[3-[[3-[[5-[[2-(acetylamino)-2-deoxy-b eta-D-galactopyranosyl]oxy]-1-oxopentyl]amino]propyl]amino] -3-oxopropoxy]methyl]-1,12,19,25-tetraoxo-16-oxa-13,20,24-t riazanonacos-1-yl]-4-hydroxy-2-pyrrolidinyl)methyl ester
ggcaggcttatctgtcttggt

SEQ ID NO: 1642 - RNA, 21 nt, synthetic construct
  source 1..21: mol_type = other RNA
  modified_base 1: mod_base = OTHER; note = 2'-O-methyladenosine-3'-phosphorothioate
  modified_base 2: mod_base = OTHER; note = 2'-O-methyluridine-3'-phosphorothioate
  modified_base 3: mod_base = OTHER; note = 2'-O-methylcytidine-3'-phosphate
  modified_base 4: mod_base = OTHER; note = 2'-O-methyluridine-3'-phosphate
  modified_base 5: mod_base = OTHER; note = 2'-O-methylguanosine-3'-phosphate
  modified_base 6: mod_base = OTHER; note = 2'-O-methyluridine-3'-phosphate
  modified_base 7: mod_base = OTHER; note = 2'-deoxy-2'-fluorocytidine-3'-phosphate
  modified_base 8: mod_base = OTHER; note = 2'-O-methyluridine-3'-phosphate
  modified_base 9: mod_base = OTHER; note = 2'-deoxy-2'-fluorouridine-3'-phosphate
  modified_base 10: mod_base = OTHER; note = 2'-deoxy-2'-fluoroguanosine-3'-phosphate
  modified_base 11: mod_base = OTHER; note = 2'-deoxy-2'-fluoroguanosine-3'-phosphate
  modified_base 12: mod_base = OTHER; note = 2'-O-methylguanosine-3'-phosphate
  modified_base 13: mod_base = OTHER; note = 2'-O-methylcytidine-3'-phosphate
  modified_base 14: mod_base = OTHER; note = 2'-O-methylcytidine-3'-phosphate
  modified_base 15: mod_base = OTHER; note = 2'-O-methyluridine-3'-phosphate
  modified_base 16: mod_base = OTHER; note = 2'-O-methylcytidine-3'-phosphate
  modified_base 17: mod_base = OTHER; note = 2'-O-methyluridine-3'-phosphate
  modified_base 18: mod_base = OTHER; note = 2'-O-methyluridine-3'-phosphate
  modified_base 19: mod_base = OTHER; note = 2'-O-methyluridine-3'-phosphate
  modified_base 20: mod_base = OTHER; note = 2'-O-methyluridine-3'-phosphate
  modified_base 21: mod_base = OTHER; note = 2'-O-methyluridine-3'-phosphate ((2S,4R)-1-[29-[[2-(acetylamino)-2-deoxy-beta-D-galactopyra nosyl]oxy]-14,14-bis[[3-[[3-[[5-[[2-(acetylamino)-2-deoxy-b eta-D-galactopyranosyl]oxy]-1-oxopentyl]amino]propyl]amino] -3-oxopropoxy]methyl]-1,12,19,25-tetraoxo-16-oxa-13,20,24-t riazanonacos-1-yl]-4-hydroxy-2-pyrrolidinyl)methyl ester
atctgtcttgggcctcttttt

SEQ ID NO: 1643 - RNA, 21 nt, synthetic construct
  source 1..21: mol_type = other RNA
  modified_base 1: mod_base = OTHER; note = 2'-O-methyluridine-3'-phosphorothioate
  modified_base 2: mod_base = OTHER; note = 2'-O-methylcytidine-3'-phosphorothioate
  modified_base 3: mod_base = OTHER; note = 2'-O-methyluridine-3'-phosphate
  modified_base 4: mod_base = OTHER; note = 2'-O-methyluridine-3'-phosphate
  modified_base 5: mod_base = OTHER; note = 2'-O-methylguanosine-3'-phosphate
  modified_base 6: mod_base = OTHER; note = 2'-O-methylguanosine-3'-phosphate
  modified_base 7: mod_base = OTHER; note = 2'-deoxy-2'-fluoroguanosine-3'-phosphate
  modified_base 8: mod_base = OTHER; note = 2'-O-methylcytidine-3'-phosphate
  modified_base 9: mod_base = OTHER; note = 2'-deoxy-2'-fluorocytidine-3'-phosphate
  modified_base 10: mod_base = OTHER; note = 2'-deoxy-2'-fluorouridine-3'-phosphate
  modified_base 11: mod_base = OTHER; note = 2'-deoxy-2'-fluorocytidine-3'-phosphate
  modified_base 12: mod_base = OTHER; note = 2'-O-methyluridine-3'-phosphate
  modified_base 13: mod_base = OTHER; note = 2'-O-methyluridine-3'-phosphate
  modified_base 14: mod_base = OTHER; note = 2'-O-methyluridine-3'-phosphate
  modified_base 15: mod_base = OTHER; note = 2'-O-methyluridine-3'-phosphate
  modified_base 16: mod_base = OTHER; note = 2'-O-methylguanosine-3'-phosphate
  modified_base 17: mod_base = OTHER; note = 2'-O-methyluridine-3'-phosphate
  modified_base 18: mod_base = OTHER; note = 2'-O-methylcytidine-3'-phosphate
  modified_base 19: mod_base = OTHER; note = 2'-O-methyladenosine-3'-phosphate
  modified_base 20: mod_base = OTHER; note = 2'-O-methylcytidine-3'-phosphate
  modified_base 21: mod_base = OTHER; note = 2'-O-methyluridine-3'-phosphate ((2S,4R)-1-[29-[[2-(acetylamino)-2-deoxy-beta-D-galactopyra nosyl]oxy]-14,14-bis[[3-[[3-[[5-[[2-(acetylamino)-2-deoxy-b eta-D-galactopyranosyl]oxy]-1-oxopentyl]amino]propyl]amino] -3-oxopropoxy]methyl]-1,12,19,25-tetraoxo-16-oxa-13,20,24-t riazanonacos-1-yl]-4-hydroxy-2-pyrrolidinyl)methyl ester
tcttgggcctcttttgtcact

SEQ ID NO: 1644 - RNA, 21 nt, synthetic construct
  source 1..21: mol_type = other RNA
  modified_base 1: mod_base = OTHER; note = 2'-O-methylguanosine-3'-phosphorothioate
  modified_base 2: mod_base = OTHER; note = 2'-O-methylguanosine-3'-phosphorothioate
  modified_base 3: mod_base = OTHER; note = 2'-O-methylcytidine-3'-phosphate
  modified_base 4: mod_base = OTHER; note = 2'-O-methylcytidine-3'-phosphate
  modified_base 5: mod_base = OTHER; note = 2'-O-methyluridine-3'-phosphate
  modified_base 6: mod_base = OTHER; note = 2'-O-methylcytidine-3'-phosphate
  modified_base 7: mod_base = OTHER; note = 2'-deoxy-2'-fluorouridine-3'-phosphate
  modified_base 8: mod_base = OTHER; note = 2'-O-methyluridine-3'-phosphate
  modified_base 9: mod_base = OTHER; note = 2'-deoxy-2'-fluorouridine-3'-phosphate
  modified_base 10: mod_base = OTHER; note = 2'-deoxy-2'-fluorouridine-3'-phosphate
  modified_base 11: mod_base = OTHER; note = 2'-deoxy-2'-fluoroguanosine-3'-phosphate
  modified_base 12: mod_base = OTHER; note = 2'-O-methyluridine-3'-phosphate
  modified_base 13: mod_base = OTHER; note = 2'-O-methylcytidine-3'-phosphate
  modified_base 14: mod_base = OTHER; note = 2'-O-methyladenosine-3'-phosphate
  modified_base 15: mod_base = OTHER; note = 2'-O-methylcytidine-3'-phosphate
  modified_base 16: mod_base = OTHER; note = 2'-O-methyladenosine-3'-phosphate
  modified_base 17: mod_base = OTHER; note = 2'-O-methyluridine-3'-phosphate
  modified_base 18: mod_base = OTHER; note = 2'-O-methyladenosine-3'-phosphate
  modified_base 19: mod_base = OTHER; note = 2'-O-methyluridine-3'-phosphate
  modified_base 20: mod_base = OTHER; note = 2'-O-methyluridine-3'-phosphate
  modified_base 21: mod_base = OTHER; note = 2'-O-methyluridine-3'-phosphate ((2S,4R)-1-[29-[[2-(acetylamino)-2-deoxy-beta-D-galactopyra nosyl]oxy]-14,14-bis[[3-[[3-[[5-[[2-(acetylamino)-2-deoxy-b eta-D-galactopyranosyl]oxy]-1-oxopentyl]amino]propyl]amino] -3-oxopropoxy]methyl]-1,12,19,25-tetraoxo-16-oxa-13,20,24-t riazanonacos-1-yl]-4-hydroxy-2-pyrrolidinyl)methyl ester
ggcctcttttgtcacatattt

SEQ ID NO: 1645 - RNA, 21 nt, synthetic construct
  source 1..21: mol_type = other RNA
  modified_base 1: mod_base = OTHER; note = 2'-O-methyluridine-3'-phosphorothioate
  modified_base 2: mod_base = OTHER; note = 2'-O-methyluridine-3'-phosphorothioate
  modified_base 3: mod_base = OTHER; note = 2'-O-methyluridine-3'-phosphate
  modified_base 4: mod_base = OTHER; note = 2'-O-methyluridine-3'-phosphate
  modified_base 5: mod_base = OTHER; note = 2'-O-methylguanosine-3'-phosphate
  modified_base 6: mod_base = OTHER; note = 2'-O-methyluridine-3'-phosphate
  modified_base 7: mod_base = OTHER; note = 2'-deoxy-2'-fluorocytidine-3'-phosphate
  modified_base 8: mod_base = OTHER; note = 2'-O-methyladenosine-3'-phosphate
  modified_base 9: mod_base = OTHER; note = 2'-deoxy-2'-fluorocytidine-3'-phosphate
  modified_base 10: mod_base = OTHER; note = 2'-deoxy-2'-fluoroadenosine-3'-phosphate
  modified_base 11: mod_base = OTHER; note = 2'-deoxy-2'-fluorouridine-3'-phosphate
  modified_base 12: mod_base = OTHER; note = 2'-O-methyladenosine-3'-phosphate
  modified_base 13: mod_base = OTHER; note = 2'-O-methyluridine-3'-phosphate
  modified_base 14: mod_base = OTHER; note = 2'-O-methyluridine-3'-phosphate
  modified_base 15: mod_base = OTHER; note = 2'-O-methylguanosine-3'-phosphate
  modified_base 16: mod_base = OTHER; note = 2'-O-methylcytidine-3'-phosphate
  modified_base 17: mod_base = OTHER; note = 2'-O-methyluridine-3'-phosphate
  modified_base 18: mod_base = OTHER; note = 2'-O-methylcytidine-3'-phosphate
  modified_base 19: mod_base = OTHER; note = 2'-O-methyladenosine-3'-phosphate
  modified_base 20: mod_base = OTHER; note = 2'-O-methyluridine-3'-phosphate
  modified_base 21: mod_base = OTHER; note = 2'-O-methyluridine-3'-phosphate ((2S,4R)-1-[29-[[2-(acetylamino)-2-deoxy-beta-D-galactopyra nosyl]oxy]-14,14-bis[[3-[[3-[[5-[[2-(acetylamino)-2-deoxy-b eta-D-galactopyranosyl]oxy]-1-oxopentyl]amino]propyl]amino] -3-oxopropoxy]methyl]-1,12,19,25-tetraoxo-16-oxa-13,20,24-t riazanonacos-1-yl]-4-hydroxy-2-pyrrolidinyl)methyl ester
ttttgtcacatattgctcatt

SEQ ID NO: 1646 - RNA, 21 nt, synthetic construct
  source 1..21: mol_type = other RNA
  modified_base 1: mod_base = OTHER; note = 2'-O-methylcytidine-3'-phosphorothioate
  modified_base 2: mod_base = OTHER; note = 2'-O-methyladenosine-3'-phosphorothioate
  modified_base 3: mod_base = OTHER; note = 2'-O-methylcytidine-3'-phosphate
  modified_base 4: mod_base = OTHER; note = 2'-O-methyladenosine-3'-phosphate
  modified_base 5: mod_base = OTHER; note = 2'-O-methyluridine-3'-phosphate
  modified_base 6: mod_base = OTHER; note = 2'-O-methyladenosine-3'-phosphate
  modified_base 7: mod_base = OTHER; note = 2'-deoxy-2'-fluorouridine-3'-phosphate
  modified_base 8: mod_base = OTHER; note = 2'-O-methyluridine-3'-phosphate
  modified_base 9: mod_base = OTHER; note = 2'-deoxy-2'-fluoroguanosine-3'-phosphate
  modified_base 10: mod_base = OTHER; note = 2'-deoxy-2'-fluorocytidine-3'-phosphate
  modified_base 11: mod_base = OTHER; note = 2'-deoxy-2'-fluorouridine-3'-phosphate
  modified_base 12: mod_base = OTHER; note = 2'-O-methylcytidine-3'-phosphate
  modified_base 13: mod_base = OTHER; note = 2'-O-methyladenosine-3'-phosphate
  modified_base 14: mod_base = OTHER; note = 2'-O-methyluridine-3'-phosphate
  modified_base 15: mod_base = OTHER; note = 2'-O-methylcytidine-3'-phosphate
  modified_base 16: mod_base = OTHER; note = 2'-O-methyluridine-3'-phosphate
  modified_base 17: mod_base = OTHER; note = 2'-O-methylguanosine-3'-phosphate
  modified_base 18: mod_base = OTHER; note = 2'-O-methyluridine-3'-phosphate
  modified_base 19: mod_base = OTHER; note = 2'-O-methylguanosine-3'-phosphate
  modified_base 20: mod_base = OTHER; note = 2'-O-methyladenosine-3'-phosphate
  modified_base 21: mod_base = OTHER; note = 2'-O-methyluridine-3'-phosphate ((2S,4R)-1-[29-[[2-(acetylamino)-2-deoxy-beta-D-galactopyra nosyl]oxy]-14,14-bis[[3-[[3-[[5-[[2-(acetylamino)-2-deoxy-b eta-D-galactopyranosyl]oxy]-1-oxopentyl]amino]propyl]amino] -3-oxopropoxy]methyl]-1,12,19,25-tetraoxo-16-oxa-13,20,24-t riazanonacos-1-yl]-4-hydroxy-2-pyrrolidinyl)methyl ester
cacatattgctcatctgtgat

SEQ ID NO: 1647 - RNA, 21 nt, synthetic construct
  source 1..21: mol_type = other RNA
  modified_base 1: mod_base = OTHER; note = 2'-O-methyladenosine-3'-phosphorothioate
  modified_base 2: mod_base = OTHER; note = 2'-O-methyluridine-3'-phosphorothioate
  modified_base 3: mod_base = OTHER; note = 2'-O-methyluridine-3'-phosphate
  modified_base 4: mod_base = OTHER; note = 2'-O-methylguanosine-3'-phosphate
  modified_base 5: mod_base = OTHER; note = 2'-O-methylcytidine-3'-phosphate
  modified_base 6: mod_base = OTHER; note = 2'-O-methyluridine-3'-phosphate
  modified_base 7: mod_base = OTHER; note = 2'-deoxy-2'-fluorocytidine-3'-phosphate
  modified_base 8: mod_base = OTHER; note = 2'-O-methyladenosine-3'-phosphate
  modified_base 9: mod_base = OTHER; note = 2'-deoxy-2'-fluorouridine-3'-phosphate
  modified_base 10: mod_base = OTHER; note = 2'-deoxy-2'-fluorocytidine-3'-phosphate
  modified_base 11: mod_base = OTHER; note = 2'-deoxy-2'-fluorouridine-3'-phosphate
  modified_base 12: mod_base = OTHER; note = 2'-O-methylguanosine-3'-phosphate
  modified_base 13: mod_base = OTHER; note = 2'-O-methyluridine-3'-phosphate
  modified_base 14: mod_base = OTHER; note = 2'-O-methylguanosine-3'-phosphate
  modified_base 15: mod_base = OTHER; note = 2'-O-methyladenosine-3'-phosphate
  modified_base 16: mod_base = OTHER; note = 2'-O-methylguanosine-3'-phosphate
  modified_base 17: mod_base = OTHER; note = 2'-O-methylcytidine-3'-phosphate
  modified_base 18: mod_base = OTHER; note = 2'-O-methyluridine-3'-phosphate
  modified_base 19: mod_base = OTHER; note = 2'-O-methylguanosine-3'-phosphate
  modified_base 20: mod_base = OTHER; note = 2'-O-methyladenosine-3'-phosphate
  modified_base 21: mod_base = OTHER; note = 2'-O-methyluridine-3'-phosphate ((2S,4R)-1-[29-[[2-(acetylamino)-2-deoxy-beta-D-galactopyra nosyl]oxy]-14,14-bis[[3-[[3-[[5-[[2-(acetylamino)-2-deoxy-b eta-D-galactopyranosyl]oxy]-1-oxopentyl]amino]propyl]amino] -3-oxopropoxy]methyl]-1,12,19,25-tetraoxo-16-oxa-13,20,24-t riazanonacos-1-yl]-4-hydroxy-2-pyrrolidinyl)methyl ester
attgctcatctgtgagctgat

SEQ ID NO: 1648 - RNA, 21 nt, synthetic construct
  source 1..21: mol_type = other RNA
  modified_base 1: mod_base = OTHER; note = 2'-O-methylcytidine-3'-phosphorothioate
  modified_base 2: mod_base = OTHER; note = 2'-O-methyladenosine-3'-phosphorothioate
  modified_base 3: mod_base = OTHER; note = 2'-O-methyluridine-3'-phosphate
  modified_base 4: mod_base = OTHER; note = 2'-O-methylcytidine-3'-phosphate
  modified_base 5: mod_base = OTHER; note = 2'-O-methyluridine-3'-phosphate
  modified_base 6: mod_base = OTHER; note = 2'-O-methylguanosine-3'-phosphate
  modified_base 7: mod_base = OTHER; note = 2'-deoxy-2'-fluorouridine-3'-phosphate
  modified_base 8: mod_base = OTHER; note = 2'-O-methylguanosine-3'-phosphate
  modified_base 9: mod_base = OTHER; note = 2'-deoxy-2'-fluoroadenosine-3'-phosphate
  modified_base 10: mod_base = OTHER; note = 2'-deoxy-2'-fluoroguanosine-3'-phosphate
  modified_base 11: mod_base = OTHER; note = 2'-deoxy-2'-fluorocytidine-3'-phosphate
  modified_base 12: mod_base = OTHER; note = 2'-O-methyluridine-3'-phosphate
  modified_base 13: mod_base = OTHER; note = 2'-O-methylguanosine-3'-phosphate
  modified_base 14: mod_base = OTHER; note = 2'-O-methyladenosine-3'-phosphate
  modified_base 15: mod_base = OTHER; note = 2'-O-methylguanosine-3'-phosphate
  modified_base 16: mod_base = OTHER; note = 2'-O-methylguanosine-3'-phosphate
  modified_base 17: mod_base = OTHER; note = 2'-O-methylcytidine-3'-phosphate
  modified_base 18: mod_base = OTHER; note = 2'-O-methylcytidine-3'-phosphate
  modified_base 19: mod_base = OTHER; note = 2'-O-methylcytidine-3'-phosphate
  modified_base 20: mod_base = OTHER; note = 2'-O-methyluridine-3'-phosphate
  modified_base 21: mod_base = OTHER; note = 2'-O-methyluridine-3'-phosphate ((2S,4R)-1-[29-[[2-(acetylamino)-2-deoxy-beta-D-galactopyra nosyl]oxy]-14,14-bis[[3-[[3-[[5-[[2-(acetylamino)-2-deoxy-b eta-D-galactopyranosyl]oxy]-1-oxopentyl]amino]propyl]amino] -3-oxopropoxy]methyl]-1,12,19,25-tetraoxo-16-oxa-13,20,24-t riazanonacos-1-yl]-4-hydroxy-2-pyrrolidinyl)methyl ester
catctgtgagctgaggccctt

SEQ ID NO: 1649 - RNA, 21 nt, synthetic construct
  source 1..21: mol_type = other RNA
  modified_base 1: mod_base = OTHER; note = 2'-O-methylguanosine-3'-phosphorothioate
  modified_base 2: mod_base = OTHER; note = 2'-O-methylguanosine-3'-phosphorothioate
  modified_base 3: mod_base = OTHER; note = 2'-O-methylcytidine-3'-phosphate
  modified_base 4: mod_base = OTHER; note = 2'-O-methylcytidine-3'-phosphate
  modified_base 5: mod_base = OTHER; note = 2'-O-methylcytidine-3'-phosphate
  modified_base 6: mod_base = OTHER; note = 2'-O-methyluridine-3'-phosphate
  modified_base 7: mod_base = OTHER; note = 2'-deoxy-2'-fluoroguanosine-3'-phosphate
  modified_base 8: mod_base = OTHER; note = 2'-O-methyladenosine-3'-phosphate
  modified_base 9: mod_base = OTHER; note = 2'-deoxy-2'-fluorocytidine-3'-phosphate
  modified_base 10: mod_base = OTHER; note = 2'-deoxy-2'-fluorouridine-3'-phosphate
  modified_base 11: mod_base = OTHER; note = 2'-deoxy-2'-fluorocytidine-3'-phosphate
  modified_base 12: mod_base = OTHER; note = 2'-O-methyladenosine-3'-phosphate
  modified_base 13: mod_base = OTHER; note = 2'-O-methylcytidine-3'-phosphate
  modified_base 14: mod_base = OTHER; note = 2'-O-methyluridine-3'-phosphate
  modified_base 15: mod_base = OTHER; note = 2'-O-methylguanosine-3'-phosphate
  modified_base 16: mod_base = OTHER; note = 2'-O-methyladenosine-3'-phosphate
  modified_base 17: mod_base = OTHER; note = 2'-O-methylguanosine-3'-phosphate
  modified_base 18: mod_base = OTHER; note = 2'-O-methyluridine-3'-phosphate
  modified_base 19: mod_base = OTHER; note = 2'-O-methyladenosine-3'-phosphate
  modified_base 20: mod_base = OTHER; note = 2'-O-methyluridine-3'-phosphate
  modified_base 21: mod_base = OTHER; note = 2'-O-methyluridine-3'-phosphate ((2S,4R)-1-[29-[[2-(acetylamino)-2-deoxy-beta-D-galactopyra nosyl]oxy]-14,14-bis[[3-[[3-[[5-[[2-(acetylamino)-2-deoxy-b eta-D-galactopyranosyl]oxy]-1-oxopentyl]amino]propyl]amino] -3-oxopropoxy]methyl]-1,12,19,25-tetraoxo-16-oxa-13,20,24-t riazanonacos-1-yl]-4-hydroxy-2-pyrrolidinyl)methyl ester
ggccctgactcactgagtatt

SEQ ID NO: 1650 - RNA, 21 nt, synthetic construct
  source 1..21: mol_type = other RNA
  modified_base 1: mod_base = OTHER; note = 2'-O-methyluridine-3'-phosphorothioate
  modified_base 2: mod_base = OTHER; note = 2'-O-methylguanosine-3'-phosphorothioate
  modified_base 3: mod_base = OTHER; note = 2'-O-methyladenosine-3'-phosphate
  modified_base 4: mod_base = OTHER; note = 2'-O-methylcytidine-3'-phosphate
  modified_base 5: mod_base = OTHER; note = 2'-O-methyluridine-3'-phosphate
  modified_base 6: mod_base = OTHER; note = 2'-O-methylcytidine-3'-phosphate
  modified_base 7: mod_base = OTHER; note = 2'-deoxy-2'-fluoroadenosine-3'-phosphate
  modified_base 8: mod_base = OTHER; note = 2'-O-methylcytidine-3'-phosphate
  modified_base 9: mod_base = OTHER; note = 2'-deoxy-2'-fluorouridine-3'-phosphate
  modified_base 10: mod_base = OTHER; note = 2'-deoxy-2'-fluoroguanosine-3'-phosphate
  modified_base 11: mod_base = OTHER; note = 2'-deoxy-2'-fluoroadenosine-3'-phosphate
  modified_base 12: mod_base = OTHER; note = 2'-O-methylguanosine-3'-phosphate
  modified_base 13: mod_base = OTHER; note = 2'-O-methyluridine-3'-phosphate
  modified_base 14: mod_base = OTHER; note = 2'-O-methyladenosine-3'-phosphate
  modified_base 15: mod_base = OTHER; note = 2'-O-methyluridine-3'-phosphate
  modified_base 16: mod_base = OTHER; note = 2'-O-methyluridine-3'-phosphate
  modified_base 17: mod_base = OTHER; note = 2'-O-methyluridine-3'-phosphate
  modified_base 18: mod_base = OTHER; note = 2'-O-methyluridine-3'-phosphate
  modified_base 19: mod_base = OTHER; note = 2'-O-methyluridine-3'-phosphate
  modified_base 20: mod_base = OTHER; note = 2'-O-methylguanosine-3'-phosphate
  modified_base 21: mod_base = OTHER; note = 2'-O-methyluridine-3'-phosphate ((2S,4R)-1-[29-[[2-(acetylamino)-2-deoxy-beta-D-galactopyra nosyl]oxy]-14,14-bis[[3-[[3-[[5-[[2-(acetylamino)-2-deoxy-b eta-D-galactopyranosyl]oxy]-1-oxopentyl]amino]propyl]amino] -3-oxopropoxy]methyl]-1,12,19,25-tetraoxo-16-oxa-13,20,24-t riazanonacos-1-yl]-4-hydroxy-2-pyrrolidinyl)methyl ester
tgactcactgagtatttttgt

SEQ ID NO: 1651 - RNA, 21 nt, synthetic construct
  source 1..21: mol_type = other RNA
  modified_base 1: mod_base = OTHER; note = 2'-O-methylguanosine-3'-phosphorothioate
  modified_base 2: mod_base = OTHER; note = 2'-O-methyladenosine-3'-phosphorothioate
  modified_base 3: mod_base = OTHER; note = 2'-O-methylguanosine-3'-phosphate
  modified_base 4: mod_base = OTHER; note = 2'-O-methylcytidine-3'-phosphate
  modified_base 5: mod_base = OTHER; note = 2'-O-methyladenosine-3'-phosphate
  modified_base 6: mod_base = OTHER; note = 2'-O-methylguanosine-3'-phosphate
  modified_base 7: mod_base = OTHER; note = 2'-deoxy-2'-fluoroadenosine-3'-phosphate
  modified_base 8: mod_base = OTHER; note = 2'-O-methyladenosine-3'-phosphate
  modified_base 9: mod_base = OTHER; note = 2'-deoxy-2'-fluoroguanosine-3'-phosphate
  modified_base 10: mod_base = OTHER; note = 2'-deoxy-2'-fluoroadenosine-3'-phosphate
  modified_base 11: mod_base = OTHER; note = 2'-deoxy-2'-fluoroadenosine-3'-phosphate
  modified_base 12: mod_base = OTHER; note = 2'-O-methylguanosine-3'-phosphate
  modified_base 13: mod_base = OTHER; note = 2'-O-methylguanosine-3'-phosphate
  modified_base 14: mod_base = OTHER; note = 2'-O-methyladenosine-3'-phosphate
  modified_base 15: mod_base = OTHER; note = 2'-O-methylguanosine-3'-phosphate
  modified_base 16: mod_base = OTHER; note = 2'-O-methyladenosine-3'-phosphate
  modified_base 17: mod_base = OTHER; note = 2'-O-methylcytidine-3'-phosphate
  modified_base 18: mod_base = OTHER; note = 2'-O-methyladenosine-3'-phosphate
  modified_base 19: mod_base = OTHER; note = 2'-O-methyluridine-3'-phosphate
  modified_base 20: mod_base = OTHER; note = 2'-O-methyluridine-3'-phosphate
  modified_base 21: mod_base = OTHER; note = 2'-O-methyluridine-3'-phosphate ((2S,4R)-1-[29-[[2-(acetylamino)-2-deoxy-beta-D-galactopyra nosyl]oxy]-14,14-bis[[3-[[3-[[5-[[2-(acetylamino)-2-deoxy-b eta-D-galactopyranosyl]oxy]-1-oxopentyl]amino]propyl]amino] -3-oxopropoxy]methyl]-1,12,19,25-tetraoxo-16-oxa-13,20,24-t riazanonacos-1-yl]-4-hydroxy-2-pyrrolidinyl)methyl ester
gagcagaagaaggagacattt

SEQ ID NO: 1652 - RNA, 21 nt, synthetic construct
  source 1..21: mol_type = other RNA
  modified_base 1: mod_base = OTHER; note = 2'-O-methylguanosine-3'-phosphorothioate
  modified_base 2: mod_base = OTHER; note = 2'-O-methyladenosine-3'-phosphorothioate
  modified_base 3: mod_base = OTHER; note = 2'-O-methyladenosine-3'-phosphate
  modified_base 4: mod_base = OTHER; note = 2'-O-methylguanosine-3'-phosphate
  modified_base 5: mod_base = OTHER; note = 2'-O-methyladenosine-3'-phosphate
  modified_base 6: mod_base = OTHER; note = 2'-O-methyladenosine-3'-phosphate
  modified_base 7: mod_base = OTHER; note = 2'-deoxy-2'-fluoroguanosine-3'-phosphate
  modified_base 8: mod_base = OTHER; note = 2'-O-methylguanosine-3'-phosphate
  modified_base 9: mod_base = OTHER; note = 2'-deoxy-2'-fluoroadenosine-3'-phosphate
  modified_base 10: mod_base = OTHER; note = 2'-deoxy-2'-fluoroguanosine-3'-phosphate
  modified_base 11: mod_base = OTHER; note = 2'-deoxy-2'-fluoroadenosine-3'-phosphate
  modified_base 12: mod_base = OTHER; note = 2'-O-methylcytidine-3'-phosphate
  modified_base 13: mod_base = OTHER; note = 2'-O-methyladenosine-3'-phosphate
  modified_base 14: mod_base = OTHER; note = 2'-O-methyluridine-3'-phosphate
  modified_base 15: mod_base = OTHER; note = 2'-O-methyluridine-3'-phosphate
  modified_base 16: mod_base = OTHER; note = 2'-O-methyluridine-3'-phosphate
  modified_base 17: mod_base = OTHER; note = 2'-O-methylcytidine-3'-phosphate
  modified_base 18: mod_base = OTHER; note = 2'-O-methyluridine-3'-phosphate
  modified_base 19: mod_base = OTHER; note = 2'-O-methylcytidine-3'-phosphate
  modified_base 20: mod_base = OTHER; note = 2'-O-methyluridine-3'-phosphate
  modified_base 21: mod_base = OTHER; note = 2'-O-methyluridine-3'-phosphate ((2S,4R)-1-[29-[[2-(acetylamino)-2-deoxy-beta-D-galactopyra nosyl]oxy]-14,14-bis[[3-[[3-[[5-[[2-(acetylamino)-2-deoxy-b eta-D-galactopyranosyl]oxy]-1-oxopentyl]amino]propyl]amino] -3-oxopropoxy]methyl]-1,12,19,25-tetraoxo-16-oxa-13,20,24-t riazanonacos-1-yl]-4-hydroxy-2-pyrrolidinyl)methyl ester
gaagaaggagacatttctctt

SEQ ID NO: 1653 - RNA, 21 nt, synthetic construct
  source 1..21: mol_type = other RNA
  modified_base 1: mod_base = OTHER; note = 2'-O-methylguanosine-3'-phosphorothioate
  modified_base 2: mod_base = OTHER; note = 2'-O-methylguanosine-3'-phosphorothioate
  modified_base 3: mod_base = OTHER; note = 2'-O-methyladenosine-3'-phosphate
  modified_base 4: mod_base = OTHER; note = 2'-O-methylguanosine-3'-phosphate
  modified_base 5: mod_base = OTHER; note = 2'-O-methyladenosine-3'-phosphate
  modified_base 6: mod_base = OTHER; note = 2'-O-methylcytidine-3'-phosphate
  modified_base 7: mod_base = OTHER; note = 2'-deoxy-2'-fluoroadenosine-3'-phosphate
  modified_base 8: mod_base = OTHER; note = 2'-O-methyluridine-3'-phosphate
  modified_base 9: mod_base = OTHER; note = 2'-deoxy-2'-fluorouridine-3'-phosphate
  modified_base 10: mod_base = OTHER; note = 2'-deoxy-2'-fluorouridine-3'-phosphate
  modified_base 11: mod_base = OTHER; note = 2'-deoxy-2'-fluorocytidine-3'-phosphate
  modified_base 12: mod_base = OTHER; note = 2'-O-methyluridine-3'-phosphate
  modified_base 13: mod_base = OTHER; note = 2'-O-methylcytidine-3'-phosphate
  modified_base 14: mod_base = OTHER; note = 2'-O-methyluridine-3'-phosphate
  modified_base 15: mod_base = OTHER; note = 2'-O-methylcytidine-3'-phosphate
  modified_base 16: mod_base = OTHER; note = 2'-O-methylcytidine-3'-phosphate
  modified_base 17: mod_base = OTHER; note = 2'-O-methylguanosine-3'-phosphate
  modified_base 18: mod_base = OTHER; note = 2'-O-methyladenosine-3'-phosphate
  modified_base 19: mod_base = OTHER; note = 2'-O-methyladenosine-3'-phosphate
  modified_base 20: mod_base = OTHER; note = 2'-O-methyladenosine-3'-phosphate
  modified_base 21: mod_base = OTHER; note = 2'-O-methyluridine-3'-phosphate ((2S,4R)-1-[29-[[2-(acetylamino)-2-deoxy-beta-D-galactopyra nosyl]oxy]-14,14-bis[[3-[[3-[[5-[[2-(acetylamino)-2-deoxy-b eta-D-galactopyranosyl]oxy]-1-oxopentyl]amino]propyl]amino] -3-oxopropoxy]methyl]-1,12,19,25-tetraoxo-16-oxa-13,20,24-t riazanonacos-1-yl]-4-hydroxy-2-pyrrolidinyl)methyl ester
ggagacatttctctccgaaat

SEQ ID NO: 1654 - RNA, 21 nt, synthetic construct
  source 1..21: mol_type = other RNA
  modified_base 1: mod_base = OTHER; note = 2'-O-methyluridine-3'-phosphorothioate
  modified_base 2: mod_base = OTHER; note = 2'-O-methyluridine-3'-phosphorothioate
  modified_base 3: mod_base = OTHER; note = 2'-O-methyluridine-3'-phosphate
  modified_base 4: mod_base = OTHER; note = 2'-O-methylcytidine-3'-phosphate
  modified_base 5: mod_base = OTHER; note = 2'-O-methyluridine-3'-phosphate
  modified_base 6: mod_base = OTHER; note = 2'-O-methylcytidine-3'-phosphate
  modified_base 7: mod_base = OTHER; note = 2'-deoxy-2'-fluorouridine-3'-phosphate
  modified_base 8: mod_base = OTHER; note = 2'-O-methylcytidine-3'-phosphate
  modified_base 9: mod_base = OTHER; note = 2'-deoxy-2'-fluorocytidine-3'-phosphate
  modified_base 10: mod_base = OTHER; note = 2'-deoxy-2'-fluoroguanosine-3'-phosphate
  modified_base 11: mod_base = OTHER; note = 2'-deoxy-2'-fluoroadenosine-3'-phosphate
  modified_base 12: mod_base = OTHER; note = 2'-O-methyladenosine-3'-phosphate
  modified_base 13: mod_base = OTHER; note = 2'-O-methyladenosine-3'-phosphate
  modified_base 14: mod_base = OTHER; note = 2'-O-methyladenosine-3'-phosphate
  modified_base 15: mod_base = OTHER; note = 2'-O-methyluridine-3'-phosphate
  modified_base 16: mod_base = OTHER; note = 2'-O-methylguanosine-3'-phosphate
  modified_base 17: mod_base = OTHER; note = 2'-O-methyladenosine-3'-phosphate
  modified_base 18: mod_base = OTHER; note = 2'-O-methyladenosine-3'-phosphate
  modified_base 19: mod_base = OTHER; note = 2'-O-methylcytidine-3'-phosphate
  modified_base 20: mod_base = OTHER; note = 2'-O-methyluridine-3'-phosphate
  modified_base 21: mod_base = OTHER; note = 2'-O-methyluridine-3'-phosphate ((2S,4R)-1-[29-[[2-(acetylamino)-2-deoxy-beta-D-galactopyra nosyl]oxy]-14,14-bis[[3-[[3-[[5-[[2-(acetylamino)-2-deoxy-b eta-D-galactopyranosyl]oxy]-1-oxopentyl]amino]propyl]amino] -3-oxopropoxy]methyl]-1,12,19,25-tetraoxo-16-oxa-13,20,24-t riazanonacos-1-yl]-4-hydroxy-2-pyrrolidinyl)methyl ester
tttctctccgaaaatgaactt

SEQ ID NO: 1655 - RNA, 21 nt, synthetic construct
  source 1..21: mol_type = other RNA
  modified_base 1: mod_base = OTHER; note = 2'-O-methylcytidine-3'-phosphorothioate
  modified_base 2: mod_base = OTHER; note = 2'-O-methyluridine-3'-phosphorothioate
  modified_base 3: mod_base = OTHER; note = 2'-O-methylcytidine-3'-phosphate
  modified_base 4: mod_base = OTHER; note = 2'-O-methylcytidine-3'-phosphate
  modified_base 5: mod_base = OTHER; note = 2'-O-methylguanosine-3'-phosphate
  modified_base 6: mod_base = OTHER; note = 2'-O-methyladenosine-3'-phosphate
  modified_base 7: mod_base = OTHER; note = 2'-deoxy-2'-fluoroadenosine-3'-phosphate
  modified_base 8: mod_base = OTHER; note = 2'-O-methyladenosine-3'-phosphate
  modified_base 9: mod_base = OTHER; note = 2'-deoxy-2'-fluoroadenosine-3'-phosphate
  modified_base 10: mod_base = OTHER; note = 2'-deoxy-2'-fluorouridine-3'-phosphate
  modified_base 11: mod_base = OTHER; note = 2'-deoxy-2'-fluoroguanosine-3'-phosphate
  modified_base 12: mod_base = OTHER; note = 2'-O-methyladenosine-3'-phosphate
  modified_base 13: mod_base = OTHER; note = 2'-O-methyladenosine-3'-phosphate
  modified_base 14: mod_base = OTHER; note = 2'-O-methylcytidine-3'-phosphate
  modified_base 15: mod_base = OTHER; note = 2'-O-methyluridine-3'-phosphate
  modified_base 16: mod_base = OTHER; note = 2'-O-methylcytidine-3'-phosphate
  modified_base 17: mod_base = OTHER; note = 2'-O-methyladenosine-3'-phosphate
  modified_base 18: mod_base = OTHER; note = 2'-O-methyladenosine-3'-phosphate
  modified_base 19: mod_base = OTHER; note = 2'-O-methylcytidine-3'-phosphate
  modified_base 20: mod_base = OTHER; note = 2'-O-methyladenosine-3'-phosphate
  modified_base 21: mod_base = OTHER; note = 2'-O-methyluridine-3'-phosphate ((2S,4R)-1-[29-[[2-(acetylamino)-2-deoxy-beta-D-galactopyra nosyl]oxy]-14,14-bis[[3-[[3-[[5-[[2-(acetylamino)-2-deoxy-b eta-D-galactopyranosyl]oxy]-1-oxopentyl]amino]propyl]amino] -3-oxopropoxy]methyl]-1,12,19,25-tetraoxo-16-oxa-13,20,24-t riazanonacos-1-yl]-4-hydroxy-2-pyrrolidinyl)methyl ester
ctccgaaaatgaactcaacat

SEQ ID NO: 1656 - RNA, 21 nt, synthetic construct
  source 1..21: mol_type = other RNA
  modified_base 1: mod_base = OTHER; note = 2'-O-methyladenosine-3'-phosphorothioate
  modified_base 2: mod_base = OTHER; note = 2'-O-methyladenosine-3'-phosphorothioate
  modified_base 3: mod_base = OTHER; note = 2'-O-methyladenosine-3'-phosphate
  modified_base 4: mod_base = OTHER; note = 2'-O-methyladenosine-3'-phosphate
  modified_base 5: mod_base = OTHER; note = 2'-O-methyluridine-3'-phosphate
  modified_base 6: mod_base = OTHER; note = 2'-O-methylguanosine-3'-phosphate
  modified_base 7: mod_base = OTHER; note = 2'-deoxy-2'-fluoroadenosine-3'-phosphate
  modified_base 8: mod_base = OTHER; note = 2'-O-methyladenosine-3'-phosphate
  modified_base 9: mod_base = OTHER; note = 2'-deoxy-2'-fluorocytidine-3'-phosphate
  modified_base 10: mod_base = OTHER; note = 2'-deoxy-2'-fluorouridine-3'-phosphate
  modified_base 11: mod_base = OTHER; note = 2'-deoxy-2'-fluorocytidine-3'-phosphate
  modified_base 12: mod_base = OTHER; note = 2'-O-methyladenosine-3'-phosphate
  modified_base 13: mod_base = OTHER; note = 2'-O-methyladenosine-3'-phosphate
  modified_base 14: mod_base = OTHER; note = 2'-O-methylcytidine-3'-phosphate
  modified_base 15: mod_base = OTHER; note = 2'-O-methyladenosine-3'-phosphate
  modified_base 16: mod_base = OTHER; note = 2'-O-methylguanosine-3'-phosphate
  modified_base 17: mod_base = OTHER; note = 2'-O-methylguanosine-3'-phosphate
  modified_base 18: mod_base = OTHER; note = 2'-O-methylcytidine-3'-phosphate
  modified_base 19: mod_base = OTHER; note = 2'-O-methylcytidine-3'-phosphate
  modified_base 20: mod_base = OTHER; note = 2'-O-methyladenosine-3'-phosphate
  modified_base 21: mod_base = OTHER; note = 2'-O-methyluridine-3'-phosphate ((2S,4R)-1-[29-[[2-(acetylamino)-2-deoxy-beta-D-galactopyra nosyl]oxy]-14,14-bis[[3-[[3-[[5-[[2-(acetylamino)-2-deoxy-b eta-D-galactopyranosyl]oxy]-1-oxopentyl]amino]propyl]amino] -3-oxopropoxy]methyl]-1,12,19,25-tetraoxo-16-oxa-13,20,24-t riazanonacos-1-yl]-4-hydroxy-2-pyrrolidinyl)methyl ester
aaaatgaactcaacaggccat

SEQ ID NO: 1657 - RNA, 21 nt, synthetic construct
  source 1..21: mol_type = other RNA
  modified_base 1: mod_base = OTHER; note = 2'-O-methylguanosine-3'-phosphorothioate
  modified_base 2: mod_base = OTHER; note = 2'-O-methyladenosine-3'-phosphorothioate
  modified_base 3: mod_base = OTHER; note = 2'-O-methyladenosine-3'-phosphate
  modified_base 4: mod_base = OTHER; note = 2'-O-methylcytidine-3'-phosphate
  modified_base 5: mod_base = OTHER; note = 2'-O-methyluridine-3'-phosphate
  modified_base 6: mod_base = OTHER; note = 2'-O-methylcytidine-3'-phosphate
  modified_base 7: mod_base = OTHER; note = 2'-deoxy-2'-fluoroadenosine-3'-phosphate
  modified_base 8: mod_base = OTHER; note = 2'-O-methyladenosine-3'-phosphate
  modified_base 9: mod_base = OTHER; note = 2'-deoxy-2'-fluorocytidine-3'-phosphate
  modified_base 10: mod_base = OTHER; note = 2'-deoxy-2'-fluoroadenosine-3'-phosphate
  modified_base 11: mod_base = OTHER; note = 2'-deoxy-2'-fluoroguanosine-3'-phosphate
  modified_base 12: mod_base = OTHER; note = 2'-O-methylguanosine-3'-phosphate
  modified_base 13: mod_base = OTHER; note = 2'-O-methylcytidine-3'-phosphate
  modified_base 14: mod_base = OTHER; note = 2'-O-methylcytidine-3'-phosphate
  modified_base 15: mod_base = OTHER; note = 2'-O-methyladenosine-3'-phosphate
  modified_base 16: mod_base = OTHER; note = 2'-O-methylcytidine-3'-phosphate
  modified_base 17: mod_base = OTHER; note = 2'-O-methylcytidine-3'-phosphate
  modified_base 18: mod_base = OTHER; note = 2'-O-methyluridine-3'-phosphate
  modified_base 19: mod_base = OTHER; note = 2'-O-methyluridine-3'-phosphate
  modified_base 20: mod_base = OTHER; note = 2'-O-methylcytidine-3'-phosphate
  modified_base 21: mod_base = OTHER; note = 2'-O-methyluridine-3'-phosphate ((2S,4R)-1-[29-[[2-(acetylamino)-2-deoxy-beta-D-galactopyra nosyl]oxy]-14,14-bis[[3-[[3-[[5-[[2-(acetylamino)-2-deoxy-b eta-D-galactopyranosyl]oxy]-1-oxopentyl]amino]propyl]amino] -3-oxopropoxy]methyl]-1,12,19,25-tetraoxo-16-oxa-13,20,24-t riazanonacos-1-yl]-4-hydroxy-2-pyrrolidinyl)methyl ester
gaactcaacaggccaccttct

SEQ ID NO: 1658 - RNA, 21 nt, synthetic construct
  source 1..21: mol_type = other RNA
  modified_base 1: mod_base = OTHER; note = 2'-O-methyladenosine-3'-phosphorothioate
  modified_base 2: mod_base = OTHER; note = 2'-O-methylcytidine-3'-phosphorothioate
  modified_base 3: mod_base = OTHER; note = 2'-O-methyladenosine-3'-phosphate
  modified_base 4: mod_base = OTHER; note = 2'-O-methylguanosine-3'-phosphate
  modified_base 5: mod_base = OTHER; note = 2'-O-methylguanosine-3'-phosphate
  modified_base 6: mod_base = OTHER; note = 2'-O-methylcytidine-3'-phosphate
  modified_base 7: mod_base = OTHER; note = 2'-deoxy-2'-fluorocytidine-3'-phosphate
  modified_base 8: mod_base = OTHER; note = 2'-O-methyladenosine-3'-phosphate
  modified_base 9: mod_base = OTHER; note = 2'-deoxy-2'-fluorocytidine-3'-phosphate
  modified_base 10: mod_base = OTHER; note = 2'-deoxy-2'-fluorocytidine-3'-phosphate
  modified_base 11: mod_base = OTHER; note = 2'-deoxy-2'-fluorouridine-3'-phosphate
  modified_base 12: mod_base = OTHER; note = 2'-O-methyluridine-3'-phosphate
  modified_base 13: mod_base = OTHER; note = 2'-O-methylcytidine-3'-phosphate
  modified_base 14: mod_base = OTHER; note = 2'-O-methyladenosine-3'-phosphate
  modified_base 15: mod_base = OTHER; note = 2'-O-methylguanosine-3'-phosphate
  modified_base 16: mod_base = OTHER; note = 2'-O-methylguanosine-3'-phosphate
  modified_base 17: mod_base = OTHER; note = 2'-O-methyladenosine-3'-phosphate
  modified_base 18: mod_base = OTHER; note = 2'-O-methyluridine-3'-phosphate
  modified_base 19: mod_base = OTHER; note = 2'-O-methylguanosine-3'-phosphate
  modified_base 20: mod_base = OTHER; note = 2'-O-methylcytidine-3'-phosphate
  modified_base 21: mod_base = OTHER; note = 2'-O-methyluridine-3'-phosphate ((2S,4R)-1-[29-[[2-(acetylamino)-2-deoxy-beta-D-galactopyra nosyl]oxy]-14,14-bis[[3-[[3-[[5-[[2-(acetylamino)-2-deoxy-b eta-D-galactopyranosyl]oxy]-1-oxopentyl]amino]propyl]amino] -3-oxopropoxy]methyl]-1,12,19,25-tetraoxo-16-oxa-13,20,24-t riazanonacos-1-yl]-4-hydroxy-2-pyrrolidinyl)methyl ester
acaggccaccttcaggatgct

SEQ ID NO: 1659 - RNA, 21 nt, synthetic construct
  source 1..21: mol_type = other RNA
  modified_base 1: mod_base = OTHER; note = 2'-O-methylcytidine-3'-phosphorothioate
  modified_base 2: mod_base = OTHER; note = 2'-O-methylcytidine-3'-phosphorothioate
  modified_base 3: mod_base = OTHER; note = 2'-O-methyladenosine-3'-phosphate
  modified_base 4: mod_base = OTHER; note = 2'-O-methylcytidine-3'-phosphate
  modified_base 5: mod_base = OTHER; note = 2'-O-methylcytidine-3'-phosphate
  modified_base 6: mod_base = OTHER; note = 2'-O-methyluridine-3'-phosphate
  modified_base 7: mod_base = OTHER; note = 2'-deoxy-2'-fluorocytidine-3'-phosphate
  modified_base 8: mod_base = OTHER; note = 2'-O-methylguanosine-3'-phosphate
  modified_base 9: mod_base = OTHER; note = 2'-deoxy-2'-fluorocytidine-3'-phosphate
  modified_base 10: mod_base = OTHER; note = 2'-deoxy-2'-fluorouridine-3'-phosphate
  modified_base 11: mod_base = OTHER; note = 2'-deoxy-2'-fluorocytidine-3'-phosphate
  modified_base 12: mod_base = OTHER; note = 2'-O-methylcytidine-3'-phosphate
  modified_base 13: mod_base = OTHER; note = 2'-O-methyladenosine-3'-phosphate
  modified_base 14: mod_base = OTHER; note = 2'-O-methyluridine-3'-phosphate
  modified_base 15: mod_base = OTHER; note = 2'-O-methylguanosine-3'-phosphate
  modified_base 16: mod_base = OTHER; note = 2'-O-methyluridine-3'-phosphate
  modified_base 17: mod_base = OTHER; note = 2'-O-methylguanosine-3'-phosphate
  modified_base 18: mod_base = OTHER; note = 2'-O-methylcytidine-3'-phosphate
  modified_base 19: mod_base = OTHER; note = 2'-O-methylcytidine-3'-phosphate
  modified_base 20: mod_base = OTHER; note = 2'-O-methyluridine-3'-phosphate
  modified_base 21: mod_base = OTHER; note = 2'-O-methyluridine-3'-phosphate ((2S,4R)-1-[29-[[2-(acetylamino)-2-deoxy-beta-D-galactopyra nosyl]oxy]-14,14-bis[[3-[[3-[[5-[[2-(acetylamino)-2-deoxy-b eta-D-galactopyranosyl]oxy]-1-oxopentyl]amino]propyl]amino] -3-oxopropoxy]methyl]-1,12,19,25-tetraoxo-16-oxa-13,20,24-t riazanonacos-1-yl]-4-hydroxy-2-pyrrolidinyl)methyl ester
ccacctcgctccatgtgcctt

SEQ ID NO: 1660 - RNA, 21 nt, synthetic construct
  source 1..21: mol_type = other RNA
  modified_base 1: mod_base = OTHER; note = 2'-O-methyluridine-3'-phosphorothioate
  modified_base 2: mod_base = OTHER; note = 2'-O-methylcytidine-3'-phosphorothioate
  modified_base 3: mod_base = OTHER; note = 2'-O-methylguanosine-3'-phosphate
  modified_base 4: mod_base = OTHER; note = 2'-O-methylcytidine-3'-phosphate
  modified_base 5: mod_base = OTHER; note = 2'-O-methyluridine-3'-phosphate
  modified_base 6: mod_base = OTHER; note = 2'-O-methylcytidine-3'-phosphate
  modified_base 7: mod_base = OTHER; note = 2'-deoxy-2'-fluorocytidine-3'-phosphate
  modified_base 8: mod_base = OTHER; note = 2'-O-methyladenosine-3'-phosphate
  modified_base 9: mod_base = OTHER; note = 2'-deoxy-2'-fluorouridine-3'-phosphate
  modified_base 10: mod_base = OTHER; note = 2'-deoxy-2'-fluoroguanosine-3'-phosphate
  modified_base 11: mod_base = OTHER; note = 2'-deoxy-2'-fluorouridine-3'-phosphate
  modified_base 12: mod_base = OTHER; note = 2'-O-methylguanosine-3'-phosphate
  modified_base 13: mod_base = OTHER; note = 2'-O-methylcytidine-3'-phosphate
  modified_base 14: mod_base = OTHER; note = 2'-O-methylcytidine-3'-phosphate
  modified_base 15: mod_base = OTHER; note = 2'-O-methyluridine-3'-phosphate
  modified_base 16: mod_base = OTHER; note = 2'-O-methylcytidine-3'-phosphate
  modified_base 17: mod_base = OTHER; note = 2'-O-methyladenosine-3'-phosphate
  modified_base 18: mod_base = OTHER; note = 2'-O-methylcytidine-3'-phosphate
  modified_base 19: mod_base = OTHER; note = 2'-O-methyluridine-3'-phosphate
  modified_base 20: mod_base = OTHER; note = 2'-O-methylcytidine-3'-phosphate
  modified_base 21: mod_base = OTHER; note = 2'-O-methyluridine-3'-phosphate ((2S,4R)-1-[29-[[2-(acetylamino)-2-deoxy-beta-D-galactopyra nosyl]oxy]-14,14-bis[[3-[[3-[[5-[[2-(acetylamino)-2-deoxy-b eta-D-galactopyranosyl]oxy]-1-oxopentyl]amino]propyl]amino] -3-oxopropoxy]methyl]-1,12,19,25-tetraoxo-16-oxa-13,20,24-t riazanonacos-1-yl]-4-hydroxy-2-pyrrolidinyl)methyl ester
tcgctccatgtgcctcactct

SEQ ID NO: 1661 - RNA, 21 nt, synthetic construct
  source 1..21: mol_type = other RNA
  modified_base 1: mod_base = OTHER; note = 2'-O-methyladenosine-3'-phosphorothioate
  modified_base 2: mod_base = OTHER; note = 2'-O-methyluridine-3'-phosphorothioate
  modified_base 3: mod_base = OTHER; note = 2'-O-methylguanosine-3'-phosphate
  modified_base 4: mod_base = OTHER; note = 2'-O-methyluridine-3'-phosphate
  modified_base 5: mod_base = OTHER; note = 2'-O-methylguanosine-3'-phosphate
  modified_base 6: mod_base = OTHER; note = 2'-O-methylcytidine-3'-phosphate
  modified_base 7: mod_base = OTHER; note = 2'-deoxy-2'-fluorocytidine-3'-phosphate
  modified_base 8: mod_base = OTHER; note = 2'-O-methyluridine-3'-phosphate
  modified_base 9: mod_base = OTHER; note = 2'-deoxy-2'-fluorocytidine-3'-phosphate
  modified_base 10: mod_base = OTHER; note = 2'-deoxy-2'-fluoroadenosine-3'-phosphate
  modified_base 11: mod_base = OTHER; note = 2'-deoxy-2'-fluorocytidine-3'-phosphate
  modified_base 12: mod_base = OTHER; note = 2'-O-methyluridine-3'-phosphate
  modified_base 13: mod_base = OTHER; note = 2'-O-methylcytidine-3'-phosphate
  modified_base 14: mod_base = OTHER; note = 2'-O-methyladenosine-3'-phosphate
  modified_base 15: mod_base = OTHER; note = 2'-O-methylcytidine-3'-phosphate
  modified_base 16: mod_base = OTHER; note = 2'-O-methyladenosine-3'-phosphate
  modified_base 17: mod_base = OTHER; note = 2'-O-methylguanosine-3'-phosphate
  modified_base 18: mod_base = OTHER; note = 2'-O-methylguanosine-3'-phosphate
  modified_base 19: mod_base = OTHER; note = 2'-O-methyladenosine-3'-phosphate
  modified_base 20: mod_base = OTHER; note = 2'-O-methyladenosine-3'-phosphate
  modified_base 21: mod_base = OTHER; note = 2'-O-methyluridine-3'-phosphate ((2S,4R)-1-[29-[[2-(acetylamino)-2-deoxy-beta-D-galactopyra nosyl]oxy]-14,14-bis[[3-[[3-[[5-[[2-(acetylamino)-2-deoxy-b eta-D-galactopyranosyl]oxy]-1-oxopentyl]amino]propyl]amino] -3-oxopropoxy]methyl]-1,12,19,25-tetraoxo-16-oxa-13,20,24-t riazanonacos-1-yl]-4-hydroxy-2-pyrrolidinyl)methyl ester
atgtgcctcactcacaggaat

SEQ ID NO: 1662 - RNA, 21 nt, synthetic construct
  source 1..21: mol_type = other RNA
  modified_base 1: mod_base = OTHER; note = 2'-O-methylcytidine-3'-phosphorothioate
  modified_base 2: mod_base = OTHER; note = 2'-O-methylcytidine-3'-phosphorothioate
  modified_base 3: mod_base = OTHER; note = 2'-O-methyluridine-3'-phosphate
  modified_base 4: mod_base = OTHER; note = 2'-O-methylcytidine-3'-phosphate
  modified_base 5: mod_base = OTHER; note = 2'-O-methyladenosine-3'-phosphate
  modified_base 6: mod_base = OTHER; note = 2'-O-methylcytidine-3'-phosphate
  modified_base 7: mod_base = OTHER; note = 2'-deoxy-2'-fluorouridine-3'-phosphate
  modified_base 8: mod_base = OTHER; note = 2'-O-methylcytidine-3'-phosphate
  modified_base 9: mod_base = OTHER; note = 2'-deoxy-2'-fluoroadenosine-3'-phosphate
  modified_base 10: mod_base = OTHER; note = 2'-deoxy-2'-fluorocytidine-3'-phosphate
  modified_base 11: mod_base = OTHER; note = 2'-deoxy-2'-fluoroadenosine-3'-phosphate
  modified_base 12: mod_base = OTHER; note = 2'-O-methylguanosine-3'-phosphate
  modified_base 13: mod_base = OTHER; note = 2'-O-methylguanosine-3'-phosphate
  modified_base 14: mod_base = OTHER; note = 2'-O-methyladenosine-3'-phosphate
  modified_base 15: mod_base = OTHER; note = 2'-O-methyladenosine-3'-phosphate
  modified_base 16: mod_base = OTHER; note = 2'-O-methylguanosine-3'-phosphate
  modified_base 17: mod_base = OTHER; note = 2'-O-methylguanosine-3'-phosphate
  modified_base 18: mod_base = OTHER; note = 2'-O-methyladenosine-3'-phosphate
  modified_base 19: mod_base = OTHER; note = 2'-O-methyladenosine-3'-phosphate
  modified_base 20: mod_base = OTHER; note = 2'-O-methyladenosine-3'-phosphate
  modified_base 21: mod_base = OTHER; note = 2'-O-methyluridine-3'-phosphate ((2S,4R)-1-[29-[[2-(acetylamino)-2-deoxy-beta-D-galactopyra nosyl]oxy]-14,14-bis[[3-[[3-[[5-[[2-(acetylamino)-2-deoxy-b eta-D-galactopyranosyl]oxy]-1-oxopentyl]amino]propyl]amino] -3-oxopropoxy]methyl]-1,12,19,25-tetraoxo-16-oxa-13,20,24-t riazanonacos-1-yl]-4-hydroxy-2-pyrrolidinyl)methyl ester
cctcactcacaggaaggaaat

SEQ ID NO: 1663 - RNA, 21 nt, synthetic construct
  source 1..21: mol_type = other RNA
  modified_base 1: mod_base = OTHER; note = 2'-O-methyladenosine-3'-phosphorothioate
  modified_base 2: mod_base = OTHER; note = 2'-O-methylcytidine-3'-phosphorothioate
  modified_base 3: mod_base = OTHER; note = 2'-O-methyladenosine-3'-phosphate
  modified_base 4: mod_base = OTHER; note = 2'-O-methylguanosine-3'-phosphate
  modified_base 5: mod_base = OTHER; note = 2'-O-methylguanosine-3'-phosphate
  modified_base 6: mod_base = OTHER; note = 2'-O-methyladenosine-3'-phosphate
  modified_base 7: mod_base = OTHER; note = 2'-deoxy-2'-fluoroadenosine-3'-phosphate
  modified_base 8: mod_base = OTHER; note = 2'-O-methylguanosine-3'-phosphate
  modified_base 9: mod_base = OTHER; note = 2'-deoxy-2'-fluoroguanosine-3'-phosphate
  modified_base 10: mod_base = OTHER; note = 2'-deoxy-2'-fluoroadenosine-3'-phosphate
  modified_base 11: mod_base = OTHER; note = 2'-deoxy-2'-fluoroadenosine-3'-phosphate
  modified_base 12: mod_base = OTHER; note = 2'-O-methyladenosine-3'-phosphate
  modified_base 13: mod_base = OTHER; note = 2'-O-methylcytidine-3'-phosphate
  modified_base 14: mod_base = OTHER; note = 2'-O-methyladenosine-3'-phosphate
  modified_base 15: mod_base = OTHER; note = 2'-O-methylguanosine-3'-phosphate
  modified_base 16: mod_base = OTHER; note = 2'-O-methylcytidine-3'-phosphate
  modified_base 17: mod_base = OTHER; note = 2'-O-methyladenosine-3'-phosphate
  modified_base 18: mod_base = OTHER; note = 2'-O-methylcytidine-3'-phosphate
  modified_base 19: mod_base = OTHER; note = 2'-O-methylcytidine-3'-phosphate
  modified_base 20: mod_base = OTHER; note = 2'-O-methyluridine-3'-phosphate
  modified_base 21: mod_base = OTHER; note = 2'-O-methyluridine-3'-phosphate ((2S,4R)-1-[29-[[2-(acetylamino)-2-deoxy-beta-D-galactopyra nosyl]oxy]-14,14-bis[[3-[[3-[[5-[[2-(acetylamino)-2-deoxy-b eta-D-galactopyranosyl]oxy]-1-oxopentyl]amino]propyl]amino] -3-oxopropoxy]methyl]-1,12,19,25-tetraoxo-16-oxa-13,20,24-t riazanonacos-1-yl]-4-hydroxy-2-pyrrolidinyl)methyl ester
acaggaaggaaacagcacctt

SEQ ID NO: 1664 - RNA, 21 nt, synthetic construct
  source 1..21: mol_type = other RNA
  modified_base 1: mod_base = OTHER; note = 2'-O-methyladenosine-3'-phosphorothioate
  modified_base 2: mod_base = OTHER; note = 2'-O-methyladenosine-3'-phosphorothioate
  modified_base 3: mod_base = OTHER; note = 2'-O-methylguanosine-3'-phosphate
  modified_base 4: mod_base = OTHER; note = 2'-O-methylguanosine-3'-phosphate
  modified_base 5: mod_base = OTHER; note = 2'-O-methyladenosine-3'-phosphate
  modified_base 6: mod_base = OTHER; note = 2'-O-methyladenosine-3'-phosphate
  modified_base 7: mod_base = OTHER; note = 2'-deoxy-2'-fluoroadenosine-3'-phosphate
  modified_base 8: mod_base = OTHER; note = 2'-O-methylcytidine-3'-phosphate
  modified_base 9: mod_base = OTHER; note = 2'-deoxy-2'-fluoroadenosine-3'-phosphate
  modified_base 10: mod_base = OTHER; note = 2'-deoxy-2'-fluoroguanosine-3'-phosphate
  modified_base 11: mod_base = OTHER; note = 2'-deoxy-2'-fluorocytidine-3'-phosphate
  modified_base 12: mod_base = OTHER; note = 2'-O-methyladenosine-3'-phosphate
  modified_base 13: mod_base = OTHER; note = 2'-O-methylcytidine-3'-phosphate
  modified_base 14: mod_base = OTHER; note = 2'-O-methylcytidine-3'-phosphate
  modified_base 15: mod_base = OTHER; note = 2'-O-methyluridine-3'-phosphate
  modified_base 16: mod_base = OTHER; note = 2'-O-methylcytidine-3'-phosphate
  modified_base 17: mod_base = OTHER; note = 2'-O-methyluridine-3'-phosphate
  modified_base 18: mod_base = OTHER; note = 2'-O-methylcytidine-3'-phosphate
  modified_base 19: mod_base = OTHER; note = 2'-O-methyluridine-3'-phosphate
  modified_base 20: mod_base = OTHER; note = 2'-O-methylcytidine-3'-phosphate
  modified_base 21: mod_base = OTHER; note = 2'-O-methyluridine-3'-phosphate ((2S,4R)-1-[29-[[2-(acetylamino)-2-deoxy-beta-D-galactopyra nosyl]oxy]-14,14-bis[[3-[[3-[[5-[[2-(acetylamino)-2-deoxy-b eta-D-galactopyranosyl]oxy]-1-oxopentyl]amino]propyl]amino] -3-oxopropoxy]methyl]-1,12,19,25-tetraoxo-16-oxa-13,20,24-t riazanonacos-1-yl]-4-hydroxy-2-pyrrolidinyl)methyl ester
aaggaaacagcacctctctct

SEQ ID NO: 1665 - RNA, 21 nt, synthetic construct
  source 1..21: mol_type = other RNA
  modified_base 1: mod_base = OTHER; note = 2'-O-methylcytidine-3'-phosphorothioate
  modified_base 2: mod_base = OTHER; note = 2'-O-methyluridine-3'-phosphorothioate
  modified_base 3: mod_base = OTHER; note = 2'-O-methylcytidine-3'-phosphate
  modified_base 4: mod_base = OTHER; note = 2'-O-methyluridine-3'-phosphate
  modified_base 5: mod_base = OTHER; note = 2'-O-methylcytidine-3'-phosphate
  modified_base 6: mod_base = OTHER; note = 2'-O-methylcytidine-3'-phosphate
  modified_base 7: mod_base = OTHER; note = 2'-deoxy-2'-fluoroadenosine-3'-phosphate
  modified_base 8: mod_base = OTHER; note = 2'-O-methylguanosine-3'-phosphate
  modified_base 9: mod_base = OTHER; note = 2'-deoxy-2'-fluoroguanosine-3'-phosphate
  modified_base 10: mod_base = OTHER; note = 2'-deoxy-2'-fluoroadenosine-3'-phosphate
  modified_base 11: mod_base = OTHER; note = 2'-deoxy-2'-fluoroguanosine-3'-phosphate
  modified_base 12: mod_base = OTHER; note = 2'-O-methylguanosine-3'-phosphate
  modified_base 13: mod_base = OTHER; note = 2'-O-methylguanosine-3'-phosphate
  modified_base 14: mod_base = OTHER; note = 2'-O-methyluridine-3'-phosphate
  modified_base 15: mod_base = OTHER; note = 2'-O-methylcytidine-3'-phosphate
  modified_base 16: mod_base = OTHER; note = 2'-O-methyluridine-3'-phosphate
  modified_base 17: mod_base = OTHER; note = 2'-O-methyluridine-3'-phosphate
  modified_base 18: mod_base = OTHER; note = 2'-O-methylcytidine-3'-phosphate
  modified_base 19: mod_base = OTHER; note = 2'-O-methyladenosine-3'-phosphate
  modified_base 20: mod_base = OTHER; note = 2'-O-methylguanosine-3'-phosphate
  modified_base 21: mod_base = OTHER; note = 2'-O-methyluridine-3'-phosphate ((2S,4R)-1-[29-[[2-(acetylamino)-2-deoxy-beta-D-galactopyra nosyl]oxy]-14,14-bis[[3-[[3-[[5-[[2-(acetylamino)-2-deoxy-b eta-D-galactopyranosyl]oxy]-1-oxopentyl]amino]propyl]amino] -3-oxopropoxy]methyl]-1,12,19,25-tetraoxo-16-oxa-13,20,24-t riazanonacos-1-yl]-4-hydroxy-2-pyrrolidinyl)methyl ester
ctctccaggagggtcttcagt

SEQ ID NO: 1666 - RNA, 21 nt, synthetic construct
  source 1..21: mol_type = other RNA
  modified_base 1: mod_base = OTHER; note = 2'-O-methylcytidine-3'-phosphorothioate
  modified_base 2: mod_base = OTHER; note = 2'-O-methyladenosine-3'-phosphorothioate
  modified_base 3: mod_base = OTHER; note = 2'-O-methylguanosine-3'-phosphate
  modified_base 4: mod_base = OTHER; note = 2'-O-methylguanosine-3'-phosphate
  modified_base 5: mod_base = OTHER; note = 2'-O-methyladenosine-3'-phosphate
  modified_base 6: mod_base = OTHER; note = 2'-O-methylguanosine-3'-phosphate
  modified_base 7: mod_base = OTHER; note = 2'-deoxy-2'-fluoroguanosine-3'-phosphate
  modified_base 8: mod_base = OTHER; note = 2'-O-methylguanosine-3'-phosphate
  modified_base 9: mod_base = OTHER; note = 2'-deoxy-2'-fluorouridine-3'-phosphate
  modified_base 10: mod_base = OTHER; note = 2'-deoxy-2'-fluorocytidine-3'-phosphate
  modified_base 11: mod_base = OTHER; note = 2'-deoxy-2'-fluorouridine-3'-phosphate
  modified_base 12: mod_base = OTHER; note = 2'-O-methyluridine-3'-phosphate
  modified_base 13: mod_base = OTHER; note = 2'-O-methylcytidine-3'-phosphate
  modified_base 14: mod_base = OTHER; note = 2'-O-methyladenosine-3'-phosphate
  modified_base 15: mod_base = OTHER; note = 2'-O-methylguanosine-3'-phosphate
  modified_base 16: mod_base = OTHER; note = 2'-O-methylguanosine-3'-phosphate
  modified_base 17: mod_base = OTHER; note = 2'-O-methyladenosine-3'-phosphate
  modified_base 18: mod_base = OTHER; note = 2'-O-methyluridine-3'-phosphate
  modified_base 19: mod_base = OTHER; note = 2'-O-methylcytidine-3'-phosphate
  modified_base 20: mod_base = OTHER; note = 2'-O-methyluridine-3'-phosphate
  modified_base 21: mod_base = OTHER; note = 2'-O-methyluridine-3'-phosphate ((2S,4R)-1-[29-[[2-(acetylamino)-2-deoxy-beta-D-galactopyra nosyl]oxy]-14,14-bis[[3-[[3-[[5-[[2-(acetylamino)-2-deoxy-b eta-D-galactopyranosyl]oxy]-1-oxopentyl]amino]propyl]amino] -3-oxopropoxy]methyl]-1,12,19,25-tetraoxo-16-oxa-13,20,24-t riazanonacos-1-yl]-4-hydroxy-2-pyrrolidinyl)methyl ester
caggagggtcttcaggatctt

SEQ ID NO: 1667 - RNA, 21 nt, synthetic construct
  source 1..21: mol_type = other RNA
  modified_base 1: mod_base = OTHER; note = 2'-O-methylguanosine-3'-phosphorothioate
  modified_base 2: mod_base = OTHER; note = 2'-O-methylguanosine-3'-phosphorothioate
  modified_base 3: mod_base = OTHER; note = 2'-O-methyluridine-3'-phosphate
  modified_base 4: mod_base = OTHER; note = 2'-O-methylcytidine-3'-phosphate
  modified_base 5: mod_base = OTHER; note = 2'-O-methyluridine-3'-phosphate
  modified_base 6: mod_base = OTHER; note = 2'-O-methyluridine-3'-phosphate
  modified_base 7: mod_base = OTHER; note = 2'-deoxy-2'-fluorocytidine-3'-phosphate
  modified_base 8: mod_base = OTHER; note = 2'-O-methyladenosine-3'-phosphate
  modified_base 9: mod_base = OTHER; note = 2'-deoxy-2'-fluoroguanosine-3'-phosphate
  modified_base 10: mod_base = OTHER; note = 2'-deoxy-2'-fluoroguanosine-3'-phosphate
  modified_base 11: mod_base = OTHER; note = 2'-deoxy-2'-fluoroadenosine-3'-phosphate
  modified_base 12: mod_base = OTHER; note = 2'-O-methyluridine-3'-phosphate
  modified_base 13: mod_base = OTHER; note = 2'-O-methylcytidine-3'-phosphate
  modified_base 14: mod_base = OTHER; note = 2'-O-methyluridine-3'-phosphate
  modified_base 15: mod_base = OTHER; note = 2'-O-methylcytidine-3'-phosphate
  modified_base 16: mod_base = OTHER; note = 2'-O-methyladenosine-3'-phosphate
  modified_base 17: mod_base = OTHER; note = 2'-O-methyluridine-3'-phosphate
  modified_base 18: mod_base = OTHER; note = 2'-O-methylcytidine-3'-phosphate
  modified_base 19: mod_base = OTHER; note = 2'-O-methylcytidine-3'-phosphate
  modified_base 20: mod_base = OTHER; note = 2'-O-methyladenosine-3'-phosphate
  modified_base 21: mod_base = OTHER; note = 2'-O-methyluridine-3'-phosphate ((2S,4R)-1-[29-[[2-(acetylamino)-2-deoxy-beta-D-galactopyra nosyl]oxy]-14,14-bis[[3-[[3-[[5-[[2-(acetylamino)-2-deoxy-b eta-D-galactopyranosyl]oxy]-1-oxopentyl]amino]propyl]amino] -3-oxopropoxy]methyl]-1,12,19,25-tetraoxo-16-oxa-13,20,24-t riazanonacos-1-yl]-4-hydroxy-2-pyrrolidinyl)methyl ester
ggtcttcaggatctcatccat

SEQ ID NO: 1668 - RNA, 21 nt, synthetic construct
  source 1..21: mol_type = other RNA
  modified_base 1: mod_base = OTHER; note = 2'-O-methyluridine-3'-phosphorothioate
  modified_base 2: mod_base = OTHER; note = 2'-O-methylcytidine-3'-phosphorothioate
  modified_base 3: mod_base = OTHER; note = 2'-O-methyladenosine-3'-phosphate
  modified_base 4: mod_base = OTHER; note = 2'-O-methylguanosine-3'-phosphate
  modified_base 5: mod_base = OTHER; note = 2'-O-methylguanosine-3'-phosphate
  modified_base 6: mod_base = OTHER; note = 2'-O-methyladenosine-3'-phosphate
  modified_base 7: mod_base = OTHER; note = 2'-deoxy-2'-fluorouridine-3'-phosphate
  modified_base 8: mod_base = OTHER; note = 2'-O-methylcytidine-3'-phosphate
  modified_base 9: mod_base = OTHER; note = 2'-deoxy-2'-fluorouridine-3'-phosphate
  modified_base 10: mod_base = OTHER; note = 2'-deoxy-2'-fluorocytidine-3'-phosphate
  modified_base 11: mod_base = OTHER; note = 2'-deoxy-2'-fluoroadenosine-3'-phosphate
  modified_base 12: mod_base = OTHER; note = 2'-O-methyluridine-3'-phosphate
  modified_base 13: mod_base = OTHER; note = 2'-O-methylcytidine-3'-phosphate
  modified_base 14: mod_base = OTHER; note = 2'-O-methylcytidine-3'-phosphate
  modified_base 15: mod_base = OTHER; note = 2'-O-methyladenosine-3'-phosphate
  modified_base 16: mod_base = OTHER; note = 2'-O-methylcytidine-3'-phosphate
  modified_base 17: mod_base = OTHER; note = 2'-O-methyladenosine-3'-phosphate
  modified_base 18: mod_base = OTHER; note = 2'-O-methylcytidine-3'-phosphate
  modified_base 19: mod_base = OTHER; note = 2'-O-methyladenosine-3'-phosphate
  modified_base 20: mod_base = OTHER; note = 2'-O-methylguanosine-3'-phosphate
  modified_base 21: mod_base = OTHER; note = 2'-O-methyluridine-3'-phosphate ((2S,4R)-1-[29-[[2-(acetylamino)-2-deoxy-beta-D-galactopyra nosyl]oxy]-14,14-bis[[3-[[3-[[5-[[2-(acetylamino)-2-deoxy-b eta-D-galactopyranosyl]oxy]-1-oxopentyl]amino]propyl]amino] -3-oxopropoxy]methyl]-1,12,19,25-tetraoxo-16-oxa-13,20,24-t riazanonacos-1-yl]-4-hydroxy-2-pyrrolidinyl)methyl ester
tcaggatctcatccacacagt

SEQ ID NO: 1669 - RNA, 21 nt, synthetic construct
  source 1..21: mol_type = other RNA
  modified_base 1: mod_base = OTHER; note = 2'-O-methyluridine-3'-phosphorothioate
  modified_base 2: mod_base = OTHER; note = 2'-O-methylcytidine-3'-phosphorothioate
  modified_base 3: mod_base = OTHER; note = 2'-O-methyladenosine-3'-phosphate
  modified_base 4: mod_base = OTHER; note = 2'-O-methyluridine-3'-phosphate
  modified_base 5: mod_base = OTHER; note = 2'-O-methylcytidine-3'-phosphate
  modified_base 6: mod_base = OTHER; note = 2'-O-methylcytidine-3'-phosphate
  modified_base 7: mod_base = OTHER; note = 2'-deoxy-2'-fluoroadenosine-3'-phosphate
  modified_base 8: mod_base = OTHER; note = 2'-O-methylcytidine-3'-phosphate
  modified_base 9: mod_base = OTHER; note = 2'-deoxy-2'-fluoroadenosine-3'-phosphate
  modified_base 10: mod_base = OTHER; note = 2'-deoxy-2'-fluorocytidine-3'-phosphate
  modified_base 11: mod_base = OTHER; note = 2'-deoxy-2'-fluoroadenosine-3'-phosphate
  modified_base 12: mod_base = OTHER; note = 2'-O-methylguanosine-3'-phosphate
  modified_base 13: mod_base = OTHER; note = 2'-O-methylcytidine-3'-phosphate
  modified_base 14: mod_base = OTHER; note = 2'-O-methylcytidine-3'-phosphate
  modified_base 15: mod_base = OTHER; note = 2'-O-methyladenosine-3'-phosphate
  modified_base 16: mod_base = OTHER; note = 2'-O-methylcytidine-3'-phosphate
  modified_base 17: mod_base = OTHER; note = 2'-O-methylcytidine-3'-phosphate
  modified_base 18: mod_base = OTHER; note = 2'-O-methyluridine-3'-phosphate
  modified_base 19: mod_base = OTHER; note = 2'-O-methyluridine-3'-phosphate
  modified_base 20: mod_base = OTHER; note = 2'-O-methylguanosine-3'-phosphate
  modified_base 21: mod_base = OTHER; note = 2'-O-methyluridine-3'-phosphate ((2S,4R)-1-[29-[[2-(acetylamino)-2-deoxy-beta-D-galactopyra nosyl]oxy]-14,14-bis[[3-[[3-[[5-[[2-(acetylamino)-2-deoxy-b eta-D-galactopyranosyl]oxy]-1-oxopentyl]amino]propyl]amino] -3-oxopropoxy]methyl]-1,12,19,25-tetraoxo-16-oxa-13,20,24-t riazanonacos-1-yl]-4-hydroxy-2-pyrrolidinyl)methyl ester
tcatccacacagccaccttgt

SEQ ID NO: 1670 - RNA, 21 nt, synthetic construct
  source 1..21: mol_type = other RNA
  modified_base 1: mod_base = OTHER; note = 2'-O-methylcytidine-3'-phosphorothioate
  modified_base 2: mod_base = OTHER; note = 2'-O-methyladenosine-3'-phosphorothioate
  modified_base 3: mod_base = OTHER; note = 2'-O-methylcytidine-3'-phosphate
  modified_base 4: mod_base = OTHER; note = 2'-O-methyladenosine-3'-phosphate
  modified_base 5: mod_base = OTHER; note = 2'-O-methylcytidine-3'-phosphate
  modified_base 6: mod_base = OTHER; note = 2'-O-methyladenosine-3'-phosphate
  modified_base 7: mod_base = OTHER; note = 2'-deoxy-2'-fluoroguanosine-3'-phosphate
  modified_base 8: mod_base = OTHER; note = 2'-O-methylcytidine-3'-phosphate
  modified_base 9: mod_base = OTHER; note = 2'-deoxy-2'-fluorocytidine-3'-phosphate
  modified_base 10: mod_base = OTHER; note = 2'-deoxy-2'-fluoroadenosine-3'-phosphate
  modified_base 11: mod_base = OTHER; note = 2'-deoxy-2'-fluorocytidine-3'-phosphate
  modified_base 12: mod_base = OTHER; note = 2'-O-methylcytidine-3'-phosphate
  modified_base 13: mod_base = OTHER; note = 2'-O-methyluridine-3'-phosphate
  modified_base 14: mod_base = OTHER; note = 2'-O-methyluridine-3'-phosphate
  modified_base 15: mod_base = OTHER; note = 2'-O-methylguanosine-3'-phosphate
  modified_base 16: mod_base = OTHER; note = 2'-O-methylguanosine-3'-phosphate
  modified_base 17: mod_base = OTHER; note = 2'-O-methyluridine-3'-phosphate
  modified_base 18: mod_base = OTHER; note = 2'-O-methylguanosine-3'-phosphate
  modified_base 19: mod_base = OTHER; note = 2'-O-methyladenosine-3'-phosphate
  modified_base 20: mod_base = OTHER; note = 2'-O-methylcytidine-3'-phosphate
  modified_base 21: mod_base = OTHER; note = 2'-O-methyluridine-3'-phosphate ((2S,4R)-1-[29-[[2-(acetylamino)-2-deoxy-beta-D-galactopyra nosyl]oxy]-14,14-bis[[3-[[3-[[5-[[2-(acetylamino)-2-deoxy-b eta-D-galactopyranosyl]oxy]-1-oxopentyl]amino]propyl]amino] -3-oxopropoxy]methyl]-1,12,19,25-tetraoxo-16-oxa-13,20,24-t riazanonacos-1-yl]-4-hydroxy-2-pyrrolidinyl)methyl ester
cacacagccaccttggtgact

SEQ ID NO: 1671 - RNA, 21 nt, synthetic construct
  source 1..21: mol_type = other RNA
  modified_base 1: mod_base = OTHER; note = 2'-O-methyladenosine-3'-phosphorothioate
  modified_base 2: mod_base = OTHER; note = 2'-O-methylguanosine-3'-phosphorothioate
  modified_base 3: mod_base = OTHER; note = 2'-O-methylcytidine-3'-phosphate
  modified_base 4: mod_base = OTHER; note = 2'-O-methylcytidine-3'-phosphate
  modified_base 5: mod_base = OTHER; note = 2'-O-methyladenosine-3'-phosphate
  modified_base 6: mod_base = OTHER; note = 2'-O-methylcytidine-3'-phosphate
  modified_base 7: mod_base = OTHER; note = 2'-deoxy-2'-fluorocytidine-3'-phosphate
  modified_base 8: mod_base = OTHER; note = 2'-O-methyluridine-3'-phosphate
  modified_base 9: mod_base = OTHER; note = 2'-deoxy-2'-fluorouridine-3'-phosphate
  modified_base 10: mod_base = OTHER; note = 2'-deoxy-2'-fluoroguanosine-3'-phosphate
  modified_base 11: mod_base = OTHER; note = 2'-deoxy-2'-fluoroguanosine-3'-phosphate
  modified_base 12: mod_base = OTHER; note = 2'-O-methyluridine-3'-phosphate
  modified_base 13: mod_base = OTHER; note = 2'-O-methylguanosine-3'-phosphate
  modified_base 14: mod_base = OTHER; note = 2'-O-methyladenosine-3'-phosphate
  modified_base 15: mod_base = OTHER; note = 2'-O-methylcytidine-3'-phosphate
  modified_base 16: mod_base = OTHER; note = 2'-O-methylcytidine-3'-phosphate
  modified_base 17: mod_base = OTHER; note = 2'-O-methyluridine-3'-phosphate
  modified_base 18: mod_base = OTHER; note = 2'-O-methylguanosine-3'-phosphate
  modified_base 19: mod_base = OTHER; note = 2'-O-methyluridine-3'-phosphate
  modified_base 20: mod_base = OTHER; note = 2'-O-methyladenosine-3'-phosphate
  modified_base 21: mod_base = OTHER; note = 2'-O-methyluridine-3'-phosphate ((2S,4R)-1-[29-[[2-(acetylamino)-2-deoxy-beta-D-galactopyra nosyl]oxy]-14,14-bis[[3-[[3-[[5-[[2-(acetylamino)-2-deoxy-b eta-D-galactopyranosyl]oxy]-1-oxopentyl]amino]propyl]amino] -3-oxopropoxy]methyl]-1,12,19,25-tetraoxo-16-oxa-13,20,24-t riazanonacos-1-yl]-4-hydroxy-2-pyrrolidinyl)methyl ester
agccaccttggtgacctgtat

SEQ ID NO: 1672 - RNA, 21 nt, synthetic construct
  source 1..21: mol_type = other RNA
  modified_base 1: mod_base = OTHER; note = 2'-O-methylcytidine-3'-phosphorothioate
  modified_base 2: mod_base = OTHER; note = 2'-O-methylcytidine-3'-phosphorothioate
  modified_base 3: mod_base = OTHER; note = 2'-O-methyluridine-3'-phosphate
  modified_base 4: mod_base = OTHER; note = 2'-O-methyluridine-3'-phosphate
  modified_base 5: mod_base = OTHER; note = 2'-O-methylguanosine-3'-phosphate
  modified_base 6: mod_base = OTHER; note = 2'-O-methylguanosine-3'-phosphate
  modified_base 7: mod_base = OTHER; note = 2'-deoxy-2'-fluorouridine-3'-phosphate
  modified_base 8: mod_base = OTHER; note = 2'-O-methylguanosine-3'-phosphate
  modified_base 9: mod_base = OTHER; note = 2'-deoxy-2'-fluoroadenosine-3'-phosphate
  modified_base 10: mod_base = OTHER; note = 2'-deoxy-2'-fluorocytidine-3'-phosphate
  modified_base 11: mod_base = OTHER; note = 2'-deoxy-2'-fluorocytidine-3'-phosphate
  modified_base 12: mod_base = OTHER; note = 2'-O-methyluridine-3'-phosphate
  modified_base 13: mod_base = OTHER; note = 2'-O-methylguanosine-3'-phosphate
  modified_base 14: mod_base = OTHER; note = 2'-O-methyluridine-3'-phosphate
  modified_base 15: mod_base = OTHER; note = 2'-O-methyladenosine-3'-phosphate
  modified_base 16: mod_base = OTHER; note = 2'-O-methylcytidine-3'-phosphate
  modified_base 17: mod_base = OTHER; note = 2'-O-methyluridine-3'-phosphate
  modified_base 18: mod_base = OTHER; note = 2'-O-methyluridine-3'-phosphate
  modified_base 19: mod_base = OTHER; note = 2'-O-methyluridine-3'-phosphate
  modified_base 20: mod_base = OTHER; note = 2'-O-methyluridine-3'-phosphate
  modified_base 21: mod_base = OTHER; note = 2'-O-methyluridine-3'-phosphate ((2S,4R)-1-[29-[[2-(acetylamino)-2-deoxy-beta-D-galactopyra nosyl]oxy]-14,14-bis[[3-[[3-[[5-[[2-(acetylamino)-2-deoxy-b eta-D-galactopyranosyl]oxy]-1-oxopentyl]amino]propyl]amino] -3-oxopropoxy]methyl]-1,12,19,25-tetraoxo-16-oxa-13,20,24-t riazanonacos-1-yl]-4-hydroxy-2-pyrrolidinyl)methyl ester
ccttggtgacctgtacttttt

SEQ ID NO: 1673 - RNA, 21 nt, synthetic construct
  source 1..21: mol_type = other RNA
  modified_base 1: mod_base = OTHER; note = 2'-O-methylguanosine-3'-phosphorothioate
  modified_base 2: mod_base = OTHER; note = 2'-O-methyluridine-3'-phosphorothioate
  modified_base 3: mod_base = OTHER; note = 2'-O-methylguanosine-3'-phosphate
  modified_base 4: mod_base = OTHER; note = 2'-O-methyladenosine-3'-phosphate
  modified_base 5: mod_base = OTHER; note = 2'-O-methylcytidine-3'-phosphate
  modified_base 6: mod_base = OTHER; note = 2'-O-methylcytidine-3'-phosphate
  modified_base 7: mod_base = OTHER; note = 2'-deoxy-2'-fluorouridine-3'-phosphate
  modified_base 8: mod_base = OTHER; note = 2'-O-methylguanosine-3'-phosphate
  modified_base 9: mod_base = OTHER; note = 2'-deoxy-2'-fluorouridine-3'-phosphate
  modified_base 10: mod_base = OTHER; note = 2'-deoxy-2'-fluoroadenosine-3'-phosphate
  modified_base 11: mod_base = OTHER; note = 2'-deoxy-2'-fluorocytidine-3'-phosphate
  modified_base 12: mod_base = OTHER; note = 2'-O-methyluridine-3'-phosphate
  modified_base 13: mod_base = OTHER; note = 2'-O-methyluridine-3'-phosphate
  modified_base 14: mod_base = OTHER; note = 2'-O-methyluridine-3'-phosphate
  modified_base 15: mod_base = OTHER; note = 2'-O-methyluridine-3'-phosphate
  modified_base 16: mod_base = OTHER; note = 2'-O-methylcytidine-3'-phosphate
  modified_base 17: mod_base = OTHER; note = 2'-O-methyluridine-3'-phosphate
  modified_base 18: mod_base = OTHER; note = 2'-O-methyladenosine-3'-phosphate
  modified_base 19: mod_base = OTHER; note = 2'-O-methylcytidine-3'-phosphate
  modified_base 20: mod_base = OTHER; note = 2'-O-methyluridine-3'-phosphate
  modified_base 21: mod_base = OTHER; note = 2'-O-methyluridine-3'-phosphate ((2S,4R)-1-[29-[[2-(acetylamino)-2-deoxy-beta-D-galactopyra nosyl]oxy]-14,14-bis[[3-[[3-[[5-[[2-(acetylamino)-2-deoxy-b eta-D-galactopyranosyl]oxy]-1-oxopentyl]amino]propyl]amino] -3-oxopropoxy]methyl]-1,12,19,25-tetraoxo-16-oxa-13,20,24-t riazanonacos-1-yl]-4-hydroxy-2-pyrrolidinyl)methyl ester
gtgacctgtacttttctactt

SEQ ID NO: 1674 - RNA, 21 nt, synthetic construct
  source 1..21: mol_type = other RNA
  modified_base 1: mod_base = OTHER; note = 2'-O-methyladenosine-3'-phosphorothioate
  modified_base 2: mod_base = OTHER; note = 2'-O-methylcytidine-3'-phosphorothioate
  modified_base 3: mod_base = OTHER; note = 2'-O-methyluridine-3'-phosphate
  modified_base 4: mod_base = OTHER; note = 2'-O-methyluridine-3'-phosphate
  modified_base 5: mod_base = OTHER; note = 2'-O-methyluridine-3'-phosphate
  modified_base 6: mod_base = OTHER; note = 2'-O-methyluridine-3'-phosphate
  modified_base 7: mod_base = OTHER; note = 2'-deoxy-2'-fluorocytidine-3'-phosphate
  modified_base 8: mod_base = OTHER; note = 2'-O-methyluridine-3'-phosphate
  modified_base 9: mod_base = OTHER; note = 2'-deoxy-2'-fluoroadenosine-3'-phosphate
  modified_base 10: mod_base = OTHER; note = 2'-deoxy-2'-fluorocytidine-3'-phosphate
  modified_base 11: mod_base = OTHER; note = 2'-deoxy-2'-fluorouridine-3'-phosphate
  modified_base 12: mod_base = OTHER; note = 2'-O-methylguanosine-3'-phosphate
  modified_base 13: mod_base = OTHER; note = 2'-O-methylguanosine-3'-phosphate
  modified_base 14: mod_base = OTHER; note = 2'-O-methylcytidine-3'-phosphate
  modified_base 15: mod_base = OTHER; note = 2'-O-methylguanosine-3'-phosphate
  modified_base 16: mod_base = OTHER; note = 2'-O-methylguanosine-3'-phosphate
  modified_base 17: mod_base = OTHER; note = 2'-O-methyluridine-3'-phosphate
  modified_base 18: mod_base = OTHER; note = 2'-O-methylcytidine-3'-phosphate
  modified_base 19: mod_base = OTHER; note = 2'-O-methyladenosine-3'-phosphate
  modified_base 20: mod_base = OTHER; note = 2'-O-methyluridine-3'-phosphate
  modified_base 21: mod_base = OTHER; note = 2'-O-methyluridine-3'-phosphate ((2S,4R)-1-[29-[[2-(acetylamino)-2-deoxy-beta-D-galactopyra nosyl]oxy]-14,14-bis[[3-[[3-[[5-[[2-(acetylamino)-2-deoxy-b eta-D-galactopyranosyl]oxy]-1-oxopentyl]amino]propyl]amino] -3-oxopropoxy]methyl]-1,12,19,25-tetraoxo-16-oxa-13,20,24-t riazanonacos-1-yl]-4-hydroxy-2-pyrrolidinyl)methyl ester
acttttctactggcggtcatt

SEQ ID NO: 1675 - RNA, 21 nt, synthetic construct
  source 1..21: mol_type = other RNA
  modified_base 1: mod_base = OTHER; note = 2'-O-methyluridine-3'-phosphorothioate
  modified_base 2: mod_base = OTHER; note = 2'-O-methylcytidine-3'-phosphorothioate
  modified_base 3: mod_base = OTHER; note = 2'-O-methyluridine-3'-phosphate
  modified_base 4: mod_base = OTHER; note = 2'-O-methyladenosine-3'-phosphate
  modified_base 5: mod_base = OTHER; note = 2'-O-methylcytidine-3'-phosphate
  modified_base 6: mod_base = OTHER; note = 2'-O-methyluridine-3'-phosphate
  modified_base 7: mod_base = OTHER; note = 2'-deoxy-2'-fluoroguanosine-3'-phosphate
  modified_base 8: mod_base = OTHER; note = 2'-O-methylguanosine-3'-phosphate
  modified_base 9: mod_base = OTHER; note = 2'-deoxy-2'-fluorocytidine-3'-phosphate
  modified_base 10: mod_base = OTHER; note = 2'-deoxy-2'-fluoroguanosine-3'-phosphate
  modified_base 11: mod_base = OTHER; note = 2'-deoxy-2'-fluoroguanosine-3'-phosphate
  modified_base 12: mod_base = OTHER; note = 2'-O-methyluridine-3'-phosphate
  modified_base 13: mod_base = OTHER; note = 2'-O-methylcytidine-3'-phosphate
  modified_base 14: mod_base = OTHER; note = 2'-O-methyladenosine-3'-phosphate
  modified_base 15: mod_base = OTHER; note = 2'-O-methyluridine-3'-phosphate
  modified_base 16: mod_base = OTHER; note = 2'-O-methylcytidine-3'-phosphate
  modified_base 17: mod_base = OTHER; note = 2'-O-methyluridine-3'-phosphate
  modified_base 18: mod_base = OTHER; note = 2'-O-methyluridine-3'-phosphate
  modified_base 19: mod_base = OTHER; note = 2'-O-methylcytidine-3'-phosphate
  modified_base 20: mod_base = OTHER; note = 2'-O-methyluridine-3'-phosphate
  modified_base 21: mod_base = OTHER; note = 2'-O-methyluridine-3'-phosphate ((2S,4R)-1-[29-[[2-(acetylamino)-2-deoxy-beta-D-galactopyra nosyl]oxy]-14,14-bis[[3-[[3-[[5-[[2-(acetylamino)-2-deoxy-b eta-D-galactopyranosyl]oxy]-1-oxopentyl]amino]propyl]amino] -3-oxopropoxy]methyl]-1,12,19,25-tetraoxo-16-oxa-13,20,24-t riazanonacos-1-yl]-4-hydroxy-2-pyrrolidinyl)methyl ester
tctactggcggtcatcttctt

SEQ ID NO: 1676 - RNA, 21 nt, synthetic construct
  source 1..21: mol_type = other RNA
  modified_base 1: mod_base = OTHER; note = 2'-O-methylguanosine-3'-phosphorothioate
  modified_base 2: mod_base = OTHER; note = 2'-O-methylguanosine-3'-phosphorothioate
  modified_base 3: mod_base = OTHER; note = 2'-O-methyluridine-3'-phosphate
  modified_base 4: mod_base = OTHER; note = 2'-O-methylcytidine-3'-phosphate
  modified_base 5: mod_base = OTHER; note = 2'-O-methyladenosine-3'-phosphate
  modified_base 6: mod_base = OTHER; note = 2'-O-methyluridine-3'-phosphate
  modified_base 7: mod_base = OTHER; note = 2'-deoxy-2'-fluorocytidine-3'-phosphate
  modified_base 8: mod_base = OTHER; note = 2'-O-methyluridine-3'-phosphate
  modified_base 9: mod_base = OTHER; note = 2'-deoxy-2'-fluorouridine-3'-phosphate
  modified_base 10: mod_base = OTHER; note = 2'-deoxy-2'-fluorocytidine-3'-phosphate
  modified_base 11: mod_base = OTHER; note = 2'-deoxy-2'-fluorouridine-3'-phosphate
  modified_base 12: mod_base = OTHER; note = 2'-O-methylguanosine-3'-phosphate
  modified_base 13: mod_base = OTHER; note = 2'-O-methylcytidine-3'-phosphate
  modified_base 14: mod_base = OTHER; note = 2'-O-methylcytidine-3'-phosphate
  modified_base 15: mod_base = OTHER; note = 2'-O-methyluridine-3'-phosphate
  modified_base 16: mod_base = OTHER; note = 2'-O-methylguanosine-3'-phosphate
  modified_base 17: mod_base = OTHER; note = 2'-O-methylguanosine-3'-phosphate
  modified_base 18: mod_base = OTHER; note = 2'-O-methylguanosine-3'-phosphate
  modified_base 19: mod_base = OTHER; note = 2'-O-methyluridine-3'-phosphate
  modified_base 20: mod_base = OTHER; note = 2'-O-methyluridine-3'-phosphate
  modified_base 21: mod_base = OTHER; note = 2'-O-methyluridine-3'-phosphate ((2S,4R)-1-[29-[[2-(acetylamino)-2-deoxy-beta-D-galactopyra nosyl]oxy]-14,14-bis[[3-[[3-[[5-[[2-(acetylamino)-2-deoxy-b eta-D-galactopyranosyl]oxy]-1-oxopentyl]amino]propyl]amino] -3-oxopropoxy]methyl]-1,12,19,25-tetraoxo-16-oxa-13,20,24-t riazanonacos-1-yl]-4-hydroxy-2-pyrrolidinyl)methyl ester
ggtcatcttctgcctgggttt

SEQ ID NO: 1677 - RNA, 21 nt, synthetic construct
  source 1..21: mol_type = other RNA
  modified_base 1: mod_base = OTHER; note = 2'-O-methyluridine-3'-phosphorothioate
  modified_base 2: mod_base = OTHER; note = 2'-O-methyluridine-3'-phosphorothioate
  modified_base 3: mod_base = OTHER; note = 2'-O-methylcytidine-3'-phosphate
  modified_base 4: mod_base = OTHER; note = 2'-O-methyluridine-3'-phosphate
  modified_base 5: mod_base = OTHER; note = 2'-O-methylguanosine-3'-phosphate
  modified_base 6: mod_base = OTHER; note = 2'-O-methylcytidine-3'-phosphate
  modified_base 7: mod_base = OTHER; note = 2'-deoxy-2'-fluorocytidine-3'-phosphate
  modified_base 8: mod_base = OTHER; note = 2'-O-methyluridine-3'-phosphate
  modified_base 9: mod_base = OTHER; note = 2'-deoxy-2'-fluoroguanosine-3'-phosphate
  modified_base 10: mod_base = OTHER; note = 2'-deoxy-2'-fluoroguanosine-3'-phosphate
  modified_base 11: mod_base = OTHER; note = 2'-deoxy-2'-fluoroguanosine-3'-phosphate
  modified_base 12: mod_base = OTHER; note = 2'-O-methyluridine-3'-phosphate
  modified_base 13: mod_base = OTHER; note = 2'-O-methyluridine-3'-phosphate
  modified_base 14: mod_base = OTHER; note = 2'-O-methylcytidine-3'-phosphate
  modified_base 15: mod_base = OTHER; note = 2'-O-methylcytidine-3'-phosphate
  modified_base 16: mod_base = OTHER; note = 2'-O-methyluridine-3'-phosphate
  modified_base 17: mod_base = OTHER; note = 2'-O-methyladenosine-3'-phosphate
  modified_base 18: mod_base = OTHER; note = 2'-O-methyluridine-3'-phosphate
  modified_base 19: mod_base = OTHER; note = 2'-O-methylguanosine-3'-phosphate
  modified_base 20: mod_base = OTHER; note = 2'-O-methylguanosine-3'-phosphate
  modified_base 21: mod_base = OTHER; note = 2'-O-methyluridine-3'-phosphate ((2S,4R)-1-[29-[[2-(acetylamino)-2-deoxy-beta-D-galactopyra nosyl]oxy]-14,14-bis[[3-[[3-[[5-[[2-(acetylamino)-2-deoxy-b eta-D-galactopyranosyl]oxy]-1-oxopentyl]amino]propyl]amino] -3-oxopropoxy]methyl]-1,12,19,25-tetraoxo-16-oxa-13,20,24-t riazanonacos-1-yl]-4-hydroxy-2-pyrrolidinyl)methyl ester
ttctgcctgggttcctatggt

SEQ ID NO: 1678 - RNA, 21 nt, synthetic construct
  source 1..21: mol_type = other RNA
  modified_base 1: mod_base = OTHER; note = 2'-O-methylcytidine-3'-phosphorothioate
  modified_base 2: mod_base = OTHER; note = 2'-O-methylcytidine-3'-phosphorothioate
  modified_base 3: mod_base = OTHER; note = 2'-O-methyluridine-3'-phosphate
  modified_base 4: mod_base = OTHER; note = 2'-O-methylguanosine-3'-phosphate
  modified_base 5: mod_base = OTHER; note = 2'-O-methylguanosine-3'-phosphate
  modified_base 6: mod_base = OTHER; note = 2'-O-methylguanosine-3'-phosphate
  modified_base 7: mod_base = OTHER; note = 2'-deoxy-2'-fluorouridine-3'-phosphate
  modified_base 8: mod_base = OTHER; note = 2'-O-methyluridine-3'-phosphate
  modified_base 9: mod_base = OTHER; note = 2'-deoxy-2'-fluorocytidine-3'-phosphate
  modified_base 10: mod_base = OTHER; note = 2'-deoxy-2'-fluorocytidine-3'-phosphate
  modified_base 11: mod_base = OTHER; note = 2'-deoxy-2'-fluorouridine-3'-phosphate
  modified_base 12: mod_base = OTHER; note = 2'-O-methyladenosine-3'-phosphate
  modified_base 13: mod_base = OTHER; note = 2'-O-methyluridine-3'-phosphate
  modified_base 14: mod_base = OTHER; note = 2'-O-methylguanosine-3'-phosphate
  modified_base 15: mod_base = OTHER; note = 2'-O-methylguanosine-3'-phosphate
  modified_base 16: mod_base = OTHER; note = 2'-O-methylcytidine-3'-phosphate
  modified_base 17: mod_base = OTHER; note = 2'-O-methyladenosine-3'-phosphate
  modified_base 18: mod_base = OTHER; note = 2'-O-methyladenosine-3'-phosphate
  modified_base 19: mod_base = OTHER; note = 2'-O-methylcytidine-3'-phosphate
  modified_base 20: mod_base = OTHER; note = 2'-O-methyluridine-3'-phosphate
  modified_base 21: mod_base = OTHER; note = 2'-O-methyluridine-3'-phosphate ((2S,4R)-1-[29-[[2-(acetylamino)-2-deoxy-beta-D-galactopyra nosyl]oxy]-14,14-bis[[3-[[3-[[5-[[2-(acetylamino)-2-deoxy-b eta-D-galactopyranosyl]oxy]-1-oxopentyl]amino]propyl]amino] -3-oxopropoxy]methyl]-1,12,19,25-tetraoxo-16-oxa-13,20,24-t riazanonacos-1-yl]-4-hydroxy-2-pyrrolidinyl)methyl ester
cctgggttcctatggcaactt

SEQ ID NO: 1679 - RNA, 21 nt, synthetic construct
  source 1..21: mol_type = other RNA
  modified_base 1: mod_base = OTHER; note = 2'-O-methylguanosine-3'-phosphorothioate
  modified_base 2: mod_base = OTHER; note = 2'-O-methyluridine-3'-phosphorothioate
  modified_base 3: mod_base = OTHER; note = 2'-O-methyluridine-3'-phosphate
  modified_base 4: mod_base = OTHER; note = 2'-O-methylcytidine-3'-phosphate
  modified_base 5: mod_base = OTHER; note = 2'-O-methylcytidine-3'-phosphate
  modified_base 6: mod_base = OTHER; note = 2'-O-methyluridine-3'-phosphate
  modified_base 7: mod_base = OTHER; note = 2'-deoxy-2'-fluoroadenosine-3'-phosphate
  modified_base 8: mod_base = OTHER; note = 2'-O-methyluridine-3'-phosphate
  modified_base 9: mod_base = OTHER; note = 2'-deoxy-2'-fluoroguanosine-3'-phosphate
  modified_base 10: mod_base = OTHER; note = 2'-deoxy-2'-fluoroguanosine-3'-phosphate
  modified_base 11: mod_base = OTHER; note = 2'-deoxy-2'-fluorocytidine-3'-phosphate
  modified_base 12: mod_base = OTHER; note = 2'-O-methyladenosine-3'-phosphate
  modified_base 13: mod_base = OTHER; note = 2'-O-methyladenosine-3'-phosphate
  modified_base 14: mod_base = OTHER; note = 2'-O-methylcytidine-3'-phosphate
  modified_base 15: mod_base = OTHER; note = 2'-O-methyluridine-3'-phosphate
  modified_base 16: mod_base = OTHER; note = 2'-O-methyluridine-3'-phosphate
  modified_base 17: mod_base = OTHER; note = 2'-O-methylcytidine-3'-phosphate
  modified_base 18: mod_base = OTHER; note = 2'-O-methyladenosine-3'-phosphate
  modified_base 19: mod_base = OTHER; note = 2'-O-methyluridine-3'-phosphate
  modified_base 20: mod_base = OTHER; note = 2'-O-methyluridine-3'-phosphate
  modified_base 21: mod_base = OTHER; note = 2'-O-methyluridine-3'-phosphate ((2S,4R)-1-[29-[[2-(acetylamino)-2-deoxy-beta-D-galactopyra nosyl]oxy]-14,14-bis[[3-[[3-[[5-[[2-(acetylamino)-2-deoxy-b eta-D-galactopyranosyl]oxy]-1-oxopentyl]amino]propyl]amino] -3-oxopropoxy]methyl]-1,12,19,25-tetraoxo-16-oxa-13,20,24-t riazanonacos-1-yl]-4-hydroxy-2-pyrrolidinyl)methyl ester
gttcctatggcaacttcattt

SEQ ID NO: 1680 - RNA, 21 nt, synthetic construct
  source 1..21: mol_type = other RNA
  modified_base 1: mod_base = OTHER; note = 2'-O-methyluridine-3'-phosphorothioate
  modified_base 2: mod_base = OTHER; note = 2'-O-methyladenosine-3'-phosphorothioate
  modified_base 3: mod_base = OTHER; note = 2'-O-methyluridine-3'-phosphate
  modified_base 4: mod_base = OTHER; note = 2'-O-methylguanosine-3'-phosphate
  modified_base 5: mod_base = OTHER; note = 2'-O-methylguanosine-3'-phosphate
  modified_base 6: mod_base = OTHER; note = 2'-O-methylcytidine-3'-phosphate
  modified_base 7: mod_base = OTHER; note = 2'-deoxy-2'-fluoroadenosine-3'-phosphate
  modified_base 8: mod_base = OTHER; note = 2'-O-methyladenosine-3'-phosphate
  modified_base 9: mod_base = OTHER; note = 2'-deoxy-2'-fluorocytidine-3'-phosphate
  modified_base 10: mod_base = OTHER; note = 2'-deoxy-2'-fluorouridine-3'-phosphate
  modified_base 11: mod_base = OTHER; note = 2'-deoxy-2'-fluorouridine-3'-phosphate
  modified_base 12: mod_base = OTHER; note = 2'-O-methylcytidine-3'-phosphate
  modified_base 13: mod_base = OTHER; note = 2'-O-methyladenosine-3'-phosphate
  modified_base 14: mod_base = OTHER; note = 2'-O-methyluridine-3'-phosphate
  modified_base 15: mod_base = OTHER; note = 2'-O-methyluridine-3'-phosphate
  modified_base 16: mod_base = OTHER; note = 2'-O-methylguanosine-3'-phosphate
  modified_base 17: mod_base = OTHER; note = 2'-O-methyluridine-3'-phosphate
  modified_base 18: mod_base = OTHER; note = 2'-O-methylcytidine-3'-phosphate
  modified_base 19: mod_base = OTHER; note = 2'-O-methyluridine-3'-phosphate
  modified_base 20: mod_base = OTHER; note = 2'-O-methyluridine-3'-phosphate
  modified_base 21: mod_base = OTHER; note = 2'-O-methyluridine-3'-phosphate ((2S,4R)-1-[29-[[2-(acetylamino)-2-deoxy-beta-D-galactopyra nosyl]oxy]-14,14-bis[[3-[[3-[[5-[[2-(acetylamino)-2-deoxy-b eta-D-galactopyranosyl]oxy]-1-oxopentyl]amino]propyl]amino] -3-oxopropoxy]methyl]-1,12,19,25-tetraoxo-16-oxa-13,20,24-t riazanonacos-1-yl]-4-hydroxy-2-pyrrolidinyl)methyl ester
tatggcaacttcattgtcttt

SEQ ID NO: 1681 - RNA, 21 nt, synthetic construct
  source 1..21: mol_type = other RNA
  modified_base 1: mod_base = OTHER; note = 2'-O-methylcytidine-3'-phosphorothioate
  modified_base 2: mod_base = OTHER; note = 2'-O-methyladenosine-3'-phosphorothioate
  modified_base 3: mod_base = OTHER; note = 2'-O-methyladenosine-3'-phosphate
  modified_base 4: mod_base = OTHER; note = 2'-O-methylcytidine-3'-phosphate
  modified_base 5: mod_base = OTHER; note = 2'-O-methyluridine-3'-phosphate
  modified_base 6: mod_base = OTHER; note = 2'-O-methyluridine-3'-phosphate
  modified_base 7: mod_base = OTHER; note = 2'-deoxy-2'-fluorocytidine-3'-phosphate
  modified_base 8: mod_base = OTHER; note = 2'-O-methyladenosine-3'-phosphate
  modified_base 9: mod_base = OTHER; note = 2'-deoxy-2'-fluorouridine-3'-phosphate
  modified_base 10: mod_base = OTHER; note = 2'-deoxy-2'-fluorouridine-3'-phosphate
  modified_base 11: mod_base = OTHER; note = 2'-deoxy-2'-fluoroguanosine-3'-phosphate
  modified_base 12: mod_base = OTHER; note = 2'-O-methyluridine-3'-phosphate
  modified_base 13: mod_base = OTHER; note = 2'-O-methylcytidine-3'-phosphate
  modified_base 14: mod_base = OTHER; note = 2'-O-methyluridine-3'-phosphate
  modified_base 15: mod_base = OTHER; note = 2'-O-methyluridine-3'-phosphate
  modified_base 16: mod_base = OTHER; note = 2'-O-methylcytidine-3'-phosphate
  modified_base 17: mod_base = OTHER; note = 2'-O-methyluridine-3'-phosphate
  modified_base 18: mod_base = OTHER; note = 2'-O-methyluridine-3'-phosphate
  modified_base 19: mod_base = OTHER; note = 2'-O-methylguanosine-3'-phosphate
  modified_base 20: mod_base = OTHER; note = 2'-O-methyluridine-3'-phosphate
  modified_base 21: mod_base = OTHER; note = 2'-O-methyluridine-3'-phosphate ((2S,4R)-1-[29-[[2-(acetylamino)-2-deoxy-beta-D-galactopyra nosyl]oxy]-14,14-bis[[3-[[3-[[5-[[2-(acetylamino)-2-deoxy-b eta-D-galactopyranosyl]oxy]-1-oxopentyl]amino]propyl]amino] -3-oxopropoxy]methyl]-1,12,19,25-tetraoxo-16-oxa-13,20,24-t riazanonacos-1-yl]-4-hydroxy-2-pyrrolidinyl)methyl ester
caacttcattgtcttcttgtt

SEQ ID NO: 1682 - RNA, 21 nt, synthetic construct
  source 1..21: mol_type = other RNA
  modified_base 1: mod_base = OTHER; note = 2'-O-methyluridine-3'-phosphorothioate
  modified_base 2: mod_base = OTHER; note = 2'-O-methylcytidine-3'-phosphorothioate
  modified_base 3: mod_base = OTHER; note = 2'-O-methyladenosine-3'-phosphate
  modified_base 4: mod_base = OTHER; note = 2'-O-methyluridine-3'-phosphate
  modified_base 5: mod_base = OTHER; note = 2'-O-methyluridine-3'-phosphate
  modified_base 6: mod_base = OTHER; note = 2'-O-methylguanosine-3'-phosphate
  modified_base 7: mod_base = OTHER; note = 2'-deoxy-2'-fluorouridine-3'-phosphate
  modified_base 8: mod_base = OTHER; note = 2'-O-methylcytidine-3'-phosphate
  modified_base 9: mod_base = OTHER; note = 2'-deoxy-2'-fluorouridine-3'-phosphate
  modified_base 10: mod_base = OTHER; note = 2'-deoxy-2'-fluorouridine-3'-phosphate
  modified_base 11: mod_base = OTHER; note = 2'-deoxy-2'-fluorocytidine-3'-phosphate
  modified_base 12: mod_base = OTHER; note = 2'-O-methyluridine-3'-phosphate
  modified_base 13: mod_base = OTHER; note = 2'-O-methyluridine-3'-phosphate
  modified_base 14: mod_base = OTHER; note = 2'-O-methylguanosine-3'-phosphate
  modified_base 15: mod_base = OTHER; note = 2'-O-methyluridine-3'-phosphate
  modified_base 16: mod_base = OTHER; note = 2'-O-methylcytidine-3'-phosphate
  modified_base 17: mod_base = OTHER; note = 2'-O-methylcytidine-3'-phosphate
  modified_base 18: mod_base = OTHER; note = 2'-O-methyluridine-3'-phosphate
  modified_base 19: mod_base = OTHER; note = 2'-O-methyluridine-3'-phosphate
  modified_base 20: mod_base = OTHER; note = 2'-O-methylcytidine-3'-phosphate
  modified_base 21: mod_base = OTHER; note = 2'-O-methyluridine-3'-phosphate ((2S,4R)-1-[29-[[2-(acetylamino)-2-deoxy-beta-D-galactopyra nosyl]oxy]-14,14-bis[[3-[[3-[[5-[[2-(acetylamino)-2-deoxy-b eta-D-galactopyranosyl]oxy]-1-oxopentyl]amino]propyl]amino] -3-oxopropoxy]methyl]-1,12,19,25-tetraoxo-16-oxa-13,20,24-t riazanonacos-1-yl]-4-hydroxy-2-pyrrolidinyl)methyl ester
tcattgtcttcttgtccttct

SEQ ID NO: 1683 - RNA, 21 nt, synthetic construct
  source 1..21: mol_type = other RNA
  modified_base 1: mod_base = OTHER; note = 2'-O-methylguanosine-3'-phosphorothioate
  modified_base 2: mod_base = OTHER; note = 2'-O-methyluridine-3'-phosphorothioate
  modified_base 3: mod_base = OTHER; note = 2'-O-methylcytidine-3'-phosphate
  modified_base 4: mod_base = OTHER; note = 2'-O-methyluridine-3'-phosphate
  modified_base 5: mod_base = OTHER; note = 2'-O-methyluridine-3'-phosphate
  modified_base 6: mod_base = OTHER; note = 2'-O-methylcytidine-3'-phosphate
  modified_base 7: mod_base = OTHER; note = 2'-deoxy-2'-fluorouridine-3'-phosphate
  modified_base 8: mod_base = OTHER; note = 2'-O-methyluridine-3'-phosphate
  modified_base 9: mod_base = OTHER; note = 2'-deoxy-2'-fluoroguanosine-3'-phosphate
  modified_base 10: mod_base = OTHER; note = 2'-deoxy-2'-fluorouridine-3'-phosphate
  modified_base 11: mod_base = OTHER; note = 2'-deoxy-2'-fluorocytidine-3'-phosphate
  modified_base 12: mod_base = OTHER; note = 2'-O-methylcytidine-3'-phosphate
  modified_base 13: mod_base = OTHER; note = 2'-O-methyluridine-3'-phosphate
  modified_base 14: mod_base = OTHER; note = 2'-O-methyluridine-3'-phosphate
  modified_base 15: mod_base = OTHER; note = 2'-O-methylcytidine-3'-phosphate
  modified_base 16: mod_base = OTHER; note = 2'-O-methyluridine-3'-phosphate
  modified_base 17: mod_base = OTHER; note = 2'-O-methyluridine-3'-phosphate
  modified_base 18: mod_base = OTHER; note = 2'-O-methylcytidine-3'-phosphate
  modified_base 19: mod_base = OTHER; note = 2'-O-methylguanosine-3'-phosphate
  modified_base 20: mod_base = OTHER; note = 2'-O-methyladenosine-3'-phosphate
  modified_base 21: mod_base = OTHER; note = 2'-O-methyluridine-3'-phosphate ((2S,4R)-1-[29-[[2-(acetylamino)-2-deoxy-beta-D-galactopyra nosyl]oxy]-14,14-bis[[3-[[3-[[5-[[2-(acetylamino)-2-deoxy-b eta-D-galactopyranosyl]oxy]-1-oxopentyl]amino]propyl]amino] -3-oxopropoxy]methyl]-1,12,19,25-tetraoxo-16-oxa-13,20,24-t riazanonacos-1-yl]-4-hydroxy-2-pyrrolidinyl)methyl ester
gtcttcttgtccttcttcgat

SEQ ID NO: 1684 - RNA, 21 nt, synthetic construct
  source 1..21: mol_type = other RNA
  modified_base 1: mod_base = OTHER; note = 2'-O-methylcytidine-3'-phosphorothioate
  modified_base 2: mod_base = OTHER; note = 2'-O-methyluridine-3'-phosphorothioate
  modified_base 3: mod_base = OTHER; note = 2'-O-methyluridine-3'-phosphate
  modified_base 4: mod_base = OTHER; note = 2'-O-methylguanosine-3'-phosphate
  modified_base 5: mod_base = OTHER; note = 2'-O-methyluridine-3'-phosphate
  modified_base 6: mod_base = OTHER; note = 2'-O-methylcytidine-3'-phosphate
  modified_base 7: mod_base = OTHER; note = 2'-deoxy-2'-fluorocytidine-3'-phosphate
  modified_base 8: mod_base = OTHER; note = 2'-O-methyluridine-3'-phosphate
  modified_base 9: mod_base = OTHER; note = 2'-deoxy-2'-fluorouridine-3'-phosphate
  modified_base 10: mod_base = OTHER; note = 2'-deoxy-2'-fluorocytidine-3'-phosphate
  modified_base 11: mod_base = OTHER; note = 2'-deoxy-2'-fluorouridine-3'-phosphate
  modified_base 12: mod_base = OTHER; note = 2'-O-methyluridine-3'-phosphate
  modified_base 13: mod_base = OTHER; note = 2'-O-methylcytidine-3'-phosphate
  modified_base 14: mod_base = OTHER; note = 2'-O-methylguanosine-3'-phosphate
  modified_base 15: mod_base = OTHER; note = 2'-O-methyladenosine-3'-phosphate
  modified_base 16: mod_base = OTHER; note = 2'-O-methyluridine-3'-phosphate
  modified_base 17: mod_base = OTHER; note = 2'-O-methylcytidine-3'-phosphate
  modified_base 18: mod_base = OTHER; note = 2'-O-methylcytidine-3'-phosphate
  modified_base 19: mod_base = OTHER; note = 2'-O-methyladenosine-3'-phosphate
  modified_base 20: mod_base = OTHER; note = 2'-O-methylguanosine-3'-phosphate
  modified_base 21: mod_base = OTHER; note = 2'-O-methyluridine-3'-phosphate ((2S,4R)-1-[29-[[2-(acetylamino)-2-deoxy-beta-D-galactopyra nosyl]oxy]-14,14-bis[[3-[[3-[[5-[[2-(acetylamino)-2-deoxy-b eta-D-galactopyranosyl]oxy]-1-oxopentyl]amino]propyl]amino] -3-oxopropoxy]methyl]-1,12,19,25-tetraoxo-16-oxa-13,20,24-t riazanonacos-1-yl]-4-hydroxy-2-pyrrolidinyl)methyl ester
cttgtccttcttcgatccagt

SEQ ID NO: 1685 - RNA, 21 nt, synthetic construct
  source 1..21: mol_type = other RNA
  modified_base 1: mod_base = OTHER; note = 2'-O-methylcytidine-3'-phosphorothioate
  modified_base 2: mod_base = OTHER; note = 2'-O-methylcytidine-3'-phosphorothioate
  modified_base 3: mod_base = OTHER; note = 2'-O-methyluridine-3'-phosphate
  modified_base 4: mod_base = OTHER; note = 2'-O-methyluridine-3'-phosphate
  modified_base 5: mod_base = OTHER; note = 2'-O-methylcytidine-3'-phosphate
  modified_base 6: mod_base = OTHER; note = 2'-O-methyluridine-3'-phosphate
  modified_base 7: mod_base = OTHER; note = 2'-deoxy-2'-fluorouridine-3'-phosphate
  modified_base 8: mod_base = OTHER; note = 2'-O-methylcytidine-3'-phosphate
  modified_base 9: mod_base = OTHER; note = 2'-deoxy-2'-fluoroguanosine-3'-phosphate
  modified_base 10: mod_base = OTHER; note = 2'-deoxy-2'-fluoroadenosine-3'-phosphate
  modified_base 11: mod_base = OTHER; note = 2'-deoxy-2'-fluorouridine-3'-phosphate
  modified_base 12: mod_base = OTHER; note = 2'-O-methylcytidine-3'-phosphate
  modified_base 13: mod_base = OTHER; note = 2'-O-methylcytidine-3'-phosphate
  modified_base 14: mod_base = OTHER; note = 2'-O-methyladenosine-3'-phosphate
  modified_base 15: mod_base = OTHER; note = 2'-O-methylguanosine-3'-phosphate
  modified_base 16: mod_base = OTHER; note = 2'-O-methylcytidine-3'-phosphate
  modified_base 17: mod_base = OTHER; note = 2'-O-methylcytidine-3'-phosphate
  modified_base 18: mod_base = OTHER; note = 2'-O-methyluridine-3'-phosphate
  modified_base 19: mod_base = OTHER; note = 2'-O-methyluridine-3'-phosphate
  modified_base 20: mod_base = OTHER; note = 2'-O-methylcytidine-3'-phosphate
  modified_base 21: mod_base = OTHER; note = 2'-O-methyluridine-3'-phosphate ((2S,4R)-1-[29-[[2-(acetylamino)-2-deoxy-beta-D-galactopyra nosyl]oxy]-14,14-bis[[3-[[3-[[5-[[2-(acetylamino)-2-deoxy-b eta-D-galactopyranosyl]oxy]-1-oxopentyl]amino]propyl]amino] -3-oxopropoxy]methyl]-1,12,19,25-tetraoxo-16-oxa-13,20,24-t riazanonacos-1-yl]-4-hydroxy-2-pyrrolidinyl)methyl ester
ccttcttcgatccagccttct

SEQ ID NO: 1686 - RNA, 21 nt, synthetic construct
  source 1..21: mol_type = other RNA
  modified_base 1: mod_base = OTHER; note = 2'-O-methylguanosine-3'-phosphorothioate
  modified_base 2: mod_base = OTHER; note = 2'-O-methyladenosine-3'-phosphorothioate
  modified_base 3: mod_base = OTHER; note = 2'-O-methyluridine-3'-phosphate
  modified_base 4: mod_base = OTHER; note = 2'-O-methylcytidine-3'-phosphate
  modified_base 5: mod_base = OTHER; note = 2'-O-methylcytidine-3'-phosphate
  modified_base 6: mod_base = OTHER; note = 2'-O-methyladenosine-3'-phosphate
  modified_base 7: mod_base = OTHER; note = 2'-deoxy-2'-fluoroguanosine-3'-phosphate
  modified_base 8: mod_base = OTHER; note = 2'-O-methylcytidine-3'-phosphate
  modified_base 9: mod_base = OTHER; note = 2'-deoxy-2'-fluorocytidine-3'-phosphate
  modified_base 10: mod_base = OTHER; note = 2'-deoxy-2'-fluorouridine-3'-phosphate
  modified_base 11: mod_base = OTHER; note = 2'-deoxy-2'-fluorouridine-3'-phosphate
  modified_base 12: mod_base = OTHER; note = 2'-O-methylcytidine-3'-phosphate
  modified_base 13: mod_base = OTHER; note = 2'-O-methyladenosine-3'-phosphate
  modified_base 14: mod_base = OTHER; note = 2'-O-methylguanosine-3'-phosphate
  modified_base 15: mod_base = OTHER; note = 2'-O-methylguanosine-3'-phosphate
  modified_base 16: mod_base = OTHER; note = 2'-O-methyladenosine-3'-phosphate
  modified_base 17: mod_base = OTHER; note = 2'-O-methyladenosine-3'-phosphate
  modified_base 18: mod_base = OTHER; note = 2'-O-methyladenosine-3'-phosphate
  modified_base 19: mod_base = OTHER; note = 2'-O-methyluridine-3'-phosphate
  modified_base 20: mod_base = OTHER; note = 2'-O-methyluridine-3'-phosphate
  modified_base 21: mod_base = OTHER; note = 2'-O-methyluridine-3'-phosphate ((2S,4R)-1-[29-[[2-(acetylamino)-2-deoxy-beta-D-galactopyra nosyl]oxy]-14,14-bis[[3-[[3-[[5-[[2-(acetylamino)-2-deoxy-b eta-D-galactopyranosyl]oxy]-1-oxopentyl]amino]propyl]amino] -3-oxopropoxy]methyl]-1,12,19,25-tetraoxo-16-oxa-13,20,24-t riazanonacos-1-yl]-4-hydroxy-2-pyrrolidinyl)methyl ester
gatccagccttcaggaaattt

SEQ ID NO: 1687 - RNA, 21 nt, synthetic construct
  source 1..21: mol_type = other RNA
  modified_base 1: mod_base = OTHER; note = 2'-O-methyladenosine-3'-phosphorothioate
  modified_base 2: mod_base = OTHER; note = 2'-O-methylguanosine-3'-phosphorothioate
  modified_base 3: mod_base = OTHER; note = 2'-O-methylcytidine-3'-phosphate
  modified_base 4: mod_base = OTHER; note = 2'-O-methylcytidine-3'-phosphate
  modified_base 5: mod_base = OTHER; note = 2'-O-methyluridine-3'-phosphate
  modified_base 6: mod_base = OTHER; note = 2'-O-methyluridine-3'-phosphate
  modified_base 7: mod_base = OTHER; note = 2'-deoxy-2'-fluorocytidine-3'-phosphate
  modified_base 8: mod_base = OTHER; note = 2'-O-methyladenosine-3'-phosphate
  modified_base 9: mod_base = OTHER; note = 2'-deoxy-2'-fluoroguanosine-3'-phosphate
  modified_base 10: mod_base = OTHER; note = 2'-deoxy-2'-fluoroguanosine-3'-phosphate
  modified_base 11: mod_base = OTHER; note = 2'-deoxy-2'-fluoroadenosine-3'-phosphate
  modified_base 12: mod_base = OTHER; note = 2'-O-methyladenosine-3'-phosphate
  modified_base 13: mod_base = OTHER; note = 2'-O-methyladenosine-3'-phosphate
  modified_base 14: mod_base = OTHER; note = 2'-O-methyluridine-3'-phosphate
  modified_base 15: mod_base = OTHER; note = 2'-O-methyluridine-3'-phosphate
  modified_base 16: mod_base = OTHER; note = 2'-O-methylcytidine-3'-phosphate
  modified_base 17: mod_base = OTHER; note = 2'-O-methyladenosine-3'-phosphate
  modified_base 18: mod_base = OTHER; note = 2'-O-methylguanosine-3'-phosphate
  modified_base 19: mod_base = OTHER; note = 2'-O-methyladenosine-3'-phosphate
  modified_base 20: mod_base = OTHER; note = 2'-O-methyladenosine-3'-phosphate
  modified_base 21: mod_base = OTHER; note = 2'-O-methyluridine-3'-phosphate ((2S,4R)-1-[29-[[2-(acetylamino)-2-deoxy-beta-D-galactopyra nosyl]oxy]-14,14-bis[[3-[[3-[[5-[[2-(acetylamino)-2-deoxy-b eta-D-galactopyranosyl]oxy]-1-oxopentyl]amino]propyl]amino] -3-oxopropoxy]methyl]-1,12,19,25-tetraoxo-16-oxa-13,20,24-t riazanonacos-1-yl]-4-hydroxy-2-pyrrolidinyl)methyl ester
agccttcaggaaattcagaat

SEQ ID NO: 1688 - RNA, 21 nt, synthetic construct
  source 1..21: mol_type = other RNA
  modified_base 1: mod_base = OTHER; note = 2'-O-methyluridine-3'-phosphorothioate
  modified_base 2: mod_base = OTHER; note = 2'-O-methylcytidine-3'-phosphorothioate
  modified_base 3: mod_base = OTHER; note = 2'-O-methyladenosine-3'-phosphate
  modified_base 4: mod_base = OTHER; note = 2'-O-methylguanosine-3'-phosphate
  modified_base 5: mod_base = OTHER; note = 2'-O-methylguanosine-3'-phosphate
  modified_base 6: mod_base = OTHER; note = 2'-O-methyladenosine-3'-phosphate
  modified_base 7: mod_base = OTHER; note = 2'-deoxy-2'-fluoroadenosine-3'-phosphate
  modified_base 8: mod_base = OTHER; note = 2'-O-methyladenosine-3'-phosphate
  modified_base 9: mod_base = OTHER; note = 2'-deoxy-2'-fluorouridine-3'-phosphate
  modified_base 10: mod_base = OTHER; note = 2'-deoxy-2'-fluorouridine-3'-phosphate
  modified_base 11: mod_base = OTHER; note = 2'-deoxy-2'-fluorocytidine-3'-phosphate
  modified_base 12: mod_base = OTHER; note = 2'-O-methyladenosine-3'-phosphate
  modified_base 13: mod_base = OTHER; note = 2'-O-methylguanosine-3'-phosphate
  modified_base 14: mod_base = OTHER; note = 2'-O-methyladenosine-3'-phosphate
  modified_base 15: mod_base = OTHER; note = 2'-O-methyladenosine-3'-phosphate
  modified_base 16: mod_base = OTHER; note = 2'-O-methylcytidine-3'-phosphate
  modified_base 17: mod_base = OTHER; note = 2'-O-methylcytidine-3'-phosphate
  modified_base 18: mod_base = OTHER; note = 2'-O-methyladenosine-3'-phosphate
  modified_base 19: mod_base = OTHER; note = 2'-O-methyladenosine-3'-phosphate
  modified_base 20: mod_base = OTHER; note = 2'-O-methylcytidine-3'-phosphate
  modified_base 21: mod_base = OTHER; note = 2'-O-methyluridine-3'-phosphate ((2S,4R)-1-[29-[[2-(acetylamino)-2-deoxy-beta-D-galactopyra nosyl]oxy]-14,14-bis[[3-[[3-[[5-[[2-(acetylamino)-2-deoxy-b eta-D-galactopyranosyl]oxy]-1-oxopentyl]amino]propyl]amino] -3-oxopropoxy]methyl]-1,12,19,25-tetraoxo-16-oxa-13,20,24-t riazanonacos-1-yl]-4-hydroxy-2-pyrrolidinyl)methyl ester
tcaggaaattcagaaccaact

SEQ ID NO: 1689 - RNA, 21 nt, synthetic construct
  source 1..21: mol_type = other RNA
  modified_base 1: mod_base = OTHER; note = 2'-O-methyladenosine-3'-phosphorothioate
  modified_base 2: mod_base = OTHER; note = 2'-O-methyluridine-3'-phosphorothioate
  modified_base 3: mod_base = OTHER; note = 2'-O-methyluridine-3'-phosphate
  modified_base 4: mod_base = OTHER; note = 2'-O-methylcytidine-3'-phosphate
  modified_base 5: mod_base = OTHER; note = 2'-O-methyladenosine-3'-phosphate
  modified_base 6: mod_base = OTHER; note = 2'-O-methylguanosine-3'-phosphate
  modified_base 7: mod_base = OTHER; note = 2'-deoxy-2'-fluoroadenosine-3'-phosphate
  modified_base 8: mod_base = OTHER; note = 2'-O-methyladenosine-3'-phosphate
  modified_base 9: mod_base = OTHER; note = 2'-deoxy-2'-fluorocytidine-3'-phosphate
  modified_base 10: mod_base = OTHER; note = 2'-deoxy-2'-fluorocytidine-3'-phosphate
  modified_base 11: mod_base = OTHER; note = 2'-deoxy-2'-fluoroadenosine-3'-phosphate
  modified_base 12: mod_base = OTHER; note = 2'-O-methyladenosine-3'-phosphate
  modified_base 13: mod_base = OTHER; note = 2'-O-methylcytidine-3'-phosphate
  modified_base 14: mod_base = OTHER; note = 2'-O-methyluridine-3'-phosphate
  modified_base 15: mod_base = OTHER; note = 2'-O-methyluridine-3'-phosphate
  modified_base 16: mod_base = OTHER; note = 2'-O-methyluridine-3'-phosphate
  modified_base 17: mod_base = OTHER; note = 2'-O-methylguanosine-3'-phosphate
  modified_base 18: mod_base = OTHER; note = 2'-O-methyladenosine-3'-phosphate
  modified_base 19: mod_base = OTHER; note = 2'-O-methyluridine-3'-phosphate
  modified_base 20: mod_base = OTHER; note = 2'-O-methyluridine-3'-phosphate
  modified_base 21: mod_base = OTHER; note = 2'-O-methyluridine-3'-phosphate ((2S,4R)-1-[29-[[2-(acetylamino)-2-deoxy-beta-D-galactopyra nosyl]oxy]-14,14-bis[[3-[[3-[[5-[[2-(acetylamino)-2-deoxy-b eta-D-galactopyranosyl]oxy]-1-oxopentyl]amino]propyl]amino] -3-oxopropoxy]methyl]-1,12,19,25-tetraoxo-16-oxa-13,20,24-t riazanonacos-1-yl]-4-hydroxy-2-pyrrolidinyl)methyl ester
attcagaaccaactttgattt

SEQ ID NO: 1690 - RNA, 21 nt, synthetic construct
  source 1..21: mol_type = other RNA
  modified_base 1: mod_base = OTHER; note = 2'-O-methyladenosine-3'-phosphorothioate
  modified_base 2: mod_base = OTHER; note = 2'-O-methyladenosine-3'-phosphorothioate
  modified_base 3: mod_base = OTHER; note = 2'-O-methylcytidine-3'-phosphate
  modified_base 4: mod_base = OTHER; note = 2'-O-methylcytidine-3'-phosphate
  modified_base 5: mod_base = OTHER; note = 2'-O-methyladenosine-3'-phosphate
  modified_base 6: mod_base = OTHER; note = 2'-O-methyladenosine-3'-phosphate
  modified_base 7: mod_base = OTHER; note = 2'-deoxy-2'-fluorocytidine-3'-phosphate
  modified_base 8: mod_base = OTHER; note = 2'-O-methyluridine-3'-phosphate
  modified_base 9: mod_base = OTHER; note = 2'-deoxy-2'-fluorouridine-3'-phosphate
  modified_base 10: mod_base = OTHER; note = 2'-deoxy-2'-fluorouridine-3'-phosphate
  modified_base 11: mod_base = OTHER; note = 2'-deoxy-2'-fluoroguanosine-3'-phosphate
  modified_base 12: mod_base = OTHER; note = 2'-O-methyladenosine-3'-phosphate
  modified_base 13: mod_base = OTHER; note = 2'-O-methyluridine-3'-phosphate
  modified_base 14: mod_base = OTHER; note = 2'-O-methyluridine-3'-phosphate
  modified_base 15: mod_base = OTHER; note = 2'-O-methyluridine-3'-phosphate
  modified_base 16: mod_base = OTHER; note = 2'-O-methylcytidine-3'-phosphate
  modified_base 17: mod_base = OTHER; note = 2'-O-methyladenosine-3'-phosphate
  modified_base 18: mod_base = OTHER; note = 2'-O-methyluridine-3'-phosphate
  modified_base 19: mod_base = OTHER; note = 2'-O-methylguanosine-3'-phosphate
  modified_base 20: mod_base = OTHER; note = 2'-O-methyladenosine-3'-phosphate
  modified_base 21: mod_base = OTHER; note = 2'-O-methyluridine-3'-phosphate ((2S,4R)-1-[29-[[2-(acetylamino)-2-deoxy-beta-D-galactopyra nosyl]oxy]-14,14-bis[[3-[[3-[[5-[[2-(acetylamino)-2-deoxy-b eta-D-galactopyranosyl]oxy]-1-oxopentyl]amino]propyl]amino] -3-oxopropoxy]methyl]-1,12,19,25-tetraoxo-16-oxa-13,20,24-t riazanonacos-1-yl]-4-hydroxy-2-pyrrolidinyl)methyl ester
aaccaactttgatttcatgat

SEQ ID NO: 1691 - RNA, 21 nt, synthetic construct
  source 1..21: mol_type = other RNA
  modified_base 1: mod_base = OTHER; note = 2'-O-methyluridine-3'-phosphorothioate
  modified_base 2: mod_base = OTHER; note = 2'-O-methyluridine-3'-phosphorothioate
  modified_base 3: mod_base = OTHER; note = 2'-O-methyluridine-3'-phosphate
  modified_base 4: mod_base = OTHER; note = 2'-O-methylguanosine-3'-phosphate
  modified_base 5: mod_base = OTHER; note = 2'-O-methyladenosine-3'-phosphate
  modified_base 6: mod_base = OTHER; note = 2'-O-methyluridine-3'-phosphate
  modified_base 7: mod_base = OTHER; note = 2'-deoxy-2'-fluorouridine-3'-phosphate
  modified_base 8: mod_base = OTHER; note = 2'-O-methyluridine-3'-phosphate
  modified_base 9: mod_base = OTHER; note = 2'-deoxy-2'-fluorocytidine-3'-phosphate
  modified_base 10: mod_base = OTHER; note = 2'-deoxy-2'-fluoroadenosine-3'-phosphate
  modified_base 11: mod_base = OTHER; note = 2'-deoxy-2'-fluorouridine-3'-phosphate
  modified_base 12: mod_base = OTHER; note = 2'-O-methylguanosine-3'-phosphate
  modified_base 13: mod_base = OTHER; note = 2'-O-methyladenosine-3'-phosphate
  modified_base 14: mod_base = OTHER; note = 2'-O-methyluridine-3'-phosphate
  modified_base 15: mod_base = OTHER; note = 2'-O-methylcytidine-3'-phosphate
  modified_base 16: mod_base = OTHER; note = 2'-O-methylcytidine-3'-phosphate
  modified_base 17: mod_base = OTHER; note = 2'-O-methyluridine-3'-phosphate
  modified_base 18: mod_base = OTHER; note = 2'-O-methylguanosine-3'-phosphate
  modified_base 19: mod_base = OTHER; note = 2'-O-methyladenosine-3'-phosphate
  modified_base 20: mod_base = OTHER; note = 2'-O-methyladenosine-3'-phosphate
  modified_base 21: mod_base = OTHER; note = 2'-O-methyluridine-3'-phosphate ((2S,4R)-1-[29-[[2-(acetylamino)-2-deoxy-beta-D-galactopyra nosyl]oxy]-14,14-bis[[3-[[3-[[5-[[2-(acetylamino)-2-deoxy-b eta-D-galactopyranosyl]oxy]-1-oxopentyl]amino]propyl]amino] -3-oxopropoxy]methyl]-1,12,19,25-tetraoxo-16-oxa-13,20,24-t riazanonacos-1-yl]-4-hydroxy-2-pyrrolidinyl)methyl ester
tttgatttcatgatcctgaat

SEQ ID NO: 1692 - RNA, 21 nt, synthetic construct
  source 1..21: mol_type = other RNA
  modified_base 1: mod_base = OTHER; note = 2'-O-methyluridine-3'-phosphorothioate
  modified_base 2: mod_base = OTHER; note = 2'-O-methyluridine-3'-phosphorothioate
  modified_base 3: mod_base = OTHER; note = 2'-O-methylcytidine-3'-phosphate
  modified_base 4: mod_base = OTHER; note = 2'-O-methyladenosine-3'-phosphate
  modified_base 5: mod_base = OTHER; note = 2'-O-methyluridine-3'-phosphate
  modified_base 6: mod_base = OTHER; note = 2'-O-methylguanosine-3'-phosphate
  modified_base 7: mod_base = OTHER; note = 2'-deoxy-2'-fluoroadenosine-3'-phosphate
  modified_base 8: mod_base = OTHER; note = 2'-O-methyluridine-3'-phosphate
  modified_base 9: mod_base = OTHER; note = 2'-deoxy-2'-fluorocytidine-3'-phosphate
  modified_base 10: mod_base = OTHER; note = 2'-deoxy-2'-fluorocytidine-3'-phosphate
  modified_base 11: mod_base = OTHER; note = 2'-deoxy-2'-fluorouridine-3'-phosphate
  modified_base 12: mod_base = OTHER; note = 2'-O-methylguanosine-3'-phosphate
  modified_base 13: mod_base = OTHER; note = 2'-O-methyladenosine-3'-phosphate
  modified_base 14: mod_base = OTHER; note = 2'-O-methyladenosine-3'-phosphate
  modified_base 15: mod_base = OTHER; note = 2'-O-methylcytidine-3'-phosphate
  modified_base 16: mod_base = OTHER; note = 2'-O-methylcytidine-3'-phosphate
  modified_base 17: mod_base = OTHER; note = 2'-O-methyluridine-3'-phosphate
  modified_base 18: mod_base = OTHER; note = 2'-O-methylguanosine-3'-phosphate
  modified_base 19: mod_base = OTHER; note = 2'-O-methyluridine-3'-phosphate
  modified_base 20: mod_base = OTHER; note = 2'-O-methylcytidine-3'-phosphate
  modified_base 21: mod_base = OTHER; note = 2'-O-methyluridine-3'-phosphate ((2S,4R)-1-[29-[[2-(acetylamino)-2-deoxy-beta-D-galactopyra nosyl]oxy]-14,14-bis[[3-[[3-[[5-[[2-(acetylamino)-2-deoxy-b eta-D-galactopyranosyl]oxy]-1-oxopentyl]amino]propyl]amino] -3-oxopropoxy]methyl]-1,12,19,25-tetraoxo-16-oxa-13,20,24-t riazanonacos-1-yl]-4-hydroxy-2-pyrrolidinyl)methyl ester
ttcatgatcctgaacctgtct

SEQ ID NO: 1693 - RNA, 21 nt, synthetic construct
  source 1..21: mol_type = other RNA
  modified_base 1: mod_base = OTHER; note = 2'-O-methylguanosine-3'-phosphorothioate
  modified_base 2: mod_base = OTHER; note = 2'-O-methyladenosine-3'-phosphorothioate
  modified_base 3: mod_base = OTHER; note = 2'-O-methyluridine-3'-phosphate
  modified_base 4: mod_base = OTHER; note = 2'-O-methylcytidine-3'-phosphate
  modified_base 5: mod_base = OTHER; note = 2'-O-methylcytidine-3'-phosphate
  modified_base 6: mod_base = OTHER; note = 2'-O-methyluridine-3'-phosphate
  modified_base 7: mod_base = OTHER; note = 2'-deoxy-2'-fluoroguanosine-3'-phosphate
  modified_base 8: mod_base = OTHER; note = 2'-O-methyladenosine-3'-phosphate
  modified_base 9: mod_base = OTHER; note = 2'-deoxy-2'-fluoroadenosine-3'-phosphate
  modified_base 10: mod_base = OTHER; note = 2'-deoxy-2'-fluorocytidine-3'-phosphate
  modified_base 11: mod_base = OTHER; note = 2'-deoxy-2'-fluorocytidine-3'-phosphate
  modified_base 12: mod_base = OTHER; note = 2'-O-methyluridine-3'-phosphate
  modified_base 13: mod_base = OTHER; note = 2'-O-methylguanosine-3'-phosphate
  modified_base 14: mod_base = OTHER; note = 2'-O-methyluridine-3'-phosphate
  modified_base 15: mod_base = OTHER; note = 2'-O-methylcytidine-3'-phosphate
  modified_base 16: mod_base = OTHER; note = 2'-O-methylcytidine-3'-phosphate
  modified_base 17: mod_base = OTHER; note = 2'-O-methyluridine-3'-phosphate
  modified_base 18: mod_base = OTHER; note = 2'-O-methyluridine-3'-phosphate
  modified_base 19: mod_base = OTHER; note = 2'-O-methylcytidine-3'-phosphate
  modified_base 20: mod_base = OTHER; note = 2'-O-methyluridine-3'-phosphate
  modified_base 21: mod_base = OTHER; note = 2'-O-methyluridine-3'-phosphate ((2S,4R)-1-[29-[[2-(acetylamino)-2-deoxy-beta-D-galactopyra nosyl]oxy]-14,14-bis[[3-[[3-[[5-[[2-(acetylamino)-2-deoxy-b eta-D-galactopyranosyl]oxy]-1-oxopentyl]amino]propyl]amino] -3-oxopropoxy]methyl]-1,12,19,25-tetraoxo-16-oxa-13,20,24-t riazanonacos-1-yl]-4-hydroxy-2-pyrrolidinyl)methyl ester
gatcctgaacctgtccttctt

SEQ ID NO: 1694 - RNA, 21 nt, synthetic construct
  source 1..21: mol_type = other RNA
  modified_base 1: mod_base = OTHER; note = 2'-O-methylguanosine-3'-phosphorothioate
  modified_base 2: mod_base = OTHER; note = 2'-O-methyladenosine-3'-phosphorothioate
  modified_base 3: mod_base = OTHER; note = 2'-O-methyladenosine-3'-phosphate
  modified_base 4: mod_base = OTHER; note = 2'-O-methylcytidine-3'-phosphate
  modified_base 5: mod_base = OTHER; note = 2'-O-methylcytidine-3'-phosphate
  modified_base 6: mod_base = OTHER; note = 2'-O-methyluridine-3'-phosphate
  modified_base 7: mod_base = OTHER; note = 2'-deoxy-2'-fluoroguanosine-3'-phosphate
  modified_base 8: mod_base = OTHER; note = 2'-O-methyluridine-3'-phosphate
  modified_base 9: mod_base = OTHER; note = 2'-deoxy-2'-fluorocytidine-3'-phosphate
  modified_base 10: mod_base = OTHER; note = 2'-deoxy-2'-fluorocytidine-3'-phosphate
  modified_base 11: mod_base = OTHER; note = 2'-deoxy-2'-fluorouridine-3'-phosphate
  modified_base 12: mod_base = OTHER; note = 2'-O-methyluridine-3'-phosphate
  modified_base 13: mod_base = OTHER; note = 2'-O-methylcytidine-3'-phosphate
  modified_base 14: mod_base = OTHER; note = 2'-O-methyluridine-3'-phosphate
  modified_base 15: mod_base = OTHER; note = 2'-O-methylguanosine-3'-phosphate
  modified_base 16: mod_base = OTHER; note = 2'-O-methyluridine-3'-phosphate
  modified_base 17: mod_base = OTHER; note = 2'-O-methylguanosine-3'-phosphate
  modified_base 18: mod_base = OTHER; note = 2'-O-methyladenosine-3'-phosphate
  modified_base 19: mod_base = OTHER; note = 2'-O-methylcytidine-3'-phosphate
  modified_base 20: mod_base = OTHER; note = 2'-O-methylcytidine-3'-phosphate
  modified_base 21: mod_base = OTHER; note = 2'-O-methyluridine-3'-phosphate ((2S,4R)-1-[29-[[2-(acetylamino)-2-deoxy-beta-D-galactopyra nosyl]oxy]-14,14-bis[[3-[[3-[[5-[[2-(acetylamino)-2-deoxy-b eta-D-galactopyranosyl]oxy]-1-oxopentyl]amino]propyl]amino] -3-oxopropoxy]methyl]-1,12,19,25-tetraoxo-16-oxa-13,20,24-t riazanonacos-1-yl]-4-hydroxy-2-pyrrolidinyl)methyl ester
gaacctgtccttctgtgacct

SEQ ID NO: 1695 - RNA, 21 nt, synthetic construct
  source 1..21: mol_type = other RNA
  modified_base 1: mod_base = OTHER; note = 2'-O-methyluridine-3'-phosphorothioate
  modified_base 2: mod_base = OTHER; note = 2'-O-methylguanosine-3'-phosphorothioate
  modified_base 3: mod_base = OTHER; note = 2'-O-methyluridine-3'-phosphate
  modified_base 4: mod_base = OTHER; note = 2'-O-methylcytidine-3'-phosphate
  modified_base 5: mod_base = OTHER; note = 2'-O-methylcytidine-3'-phosphate
  modified_base 6: mod_base = OTHER; note = 2'-O-methyluridine-3'-phosphate
  modified_base 7: mod_base = OTHER; note = 2'-deoxy-2'-fluorouridine-3'-phosphate
  modified_base 8: mod_base = OTHER; note = 2'-O-methylcytidine-3'-phosphate
  modified_base 9: mod_base = OTHER; note = 2'-deoxy-2'-fluorouridine-3'-phosphate
  modified_base 10: mod_base = OTHER; note = 2'-deoxy-2'-fluoroguanosine-3'-phosphate
  modified_base 11: mod_base = OTHER; note = 2'-deoxy-2'-fluorouridine-3'-phosphate
  modified_base 12: mod_base = OTHER; note = 2'-O-methylguanosine-3'-phosphate
  modified_base 13: mod_base = OTHER; note = 2'-O-methyladenosine-3'-phosphate
  modified_base 14: mod_base = OTHER; note = 2'-O-methylcytidine-3'-phosphate
  modified_base 15: mod_base = OTHER; note = 2'-O-methylcytidine-3'-phosphate
  modified_base 16: mod_base = OTHER; note = 2'-O-methyluridine-3'-phosphate
  modified_base 17: mod_base = OTHER; note = 2'-O-methylcytidine-3'-phosphate
  modified_base 18: mod_base = OTHER; note = 2'-O-methyluridine-3'-phosphate
  modified_base 19: mod_base = OTHER; note = 2'-O-methyluridine-3'-phosphate
  modified_base 20: mod_base = OTHER; note = 2'-O-methylcytidine-3'-phosphate
  modified_base 21: mod_base = OTHER; note = 2'-O-methyluridine-3'-phosphate ((2S,4R)-1-[29-[[2-(acetylamino)-2-deoxy-beta-D-galactopyra nosyl]oxy]-14,14-bis[[3-[[3-[[5-[[2-(acetylamino)-2-deoxy-b eta-D-galactopyranosyl]oxy]-1-oxopentyl]amino]propyl]amino] -3-oxopropoxy]methyl]-1,12,19,25-tetraoxo-16-oxa-13,20,24-t riazanonacos-1-yl]-4-hydroxy-2-pyrrolidinyl)methyl ester
tgtccttctgtgacctcttct

SEQ ID NO: 1696 - RNA, 21 nt, synthetic construct
  source 1..21: mol_type = other RNA
  modified_base 1: mod_base = OTHER; note = 2'-O-methyluridine-3'-phosphorothioate
  modified_base 2: mod_base = OTHER; note = 2'-O-methyluridine-3'-phosphorothioate
  modified_base 3: mod_base = OTHER; note = 2'-O-methylcytidine-3'-phosphate
  modified_base 4: mod_base = OTHER; note = 2'-O-methyluridine-3'-phosphate
  modified_base 5: mod_base = OTHER; note = 2'-O-methylguanosine-3'-phosphate
  modified_base 6: mod_base = OTHER; note = 2'-O-methyluridine-3'-phosphate
  modified_base 7: mod_base = OTHER; note = 2'-deoxy-2'-fluoroguanosine-3'-phosphate
  modified_base 8: mod_base = OTHER; note = 2'-O-methyladenosine-3'-phosphate
  modified_base 9: mod_base = OTHER; note = 2'-deoxy-2'-fluorocytidine-3'-phosphate
  modified_base 10: mod_base = OTHER; note = 2'-deoxy-2'-fluorocytidine-3'-phosphate
  modified_base 11: mod_base = OTHER; note = 2'-deoxy-2'-fluorouridine-3'-phosphate
  modified_base 12: mod_base = OTHER; note = 2'-O-methylcytidine-3'-phosphate
  modified_base 13: mod_base = OTHER; note = 2'-O-methyluridine-3'-phosphate
  modified_base 14: mod_base = OTHER; note = 2'-O-methyluridine-3'-phosphate
  modified_base 15: mod_base = OTHER; note = 2'-O-methylcytidine-3'-phosphate
  modified_base 16: mod_base = OTHER; note = 2'-O-methyladenosine-3'-phosphate
  modified_base 17: mod_base = OTHER; note = 2'-O-methyluridine-3'-phosphate
  modified_base 18: mod_base = OTHER; note = 2'-O-methyluridine-3'-phosphate
  modified_base 19: mod_base = OTHER; note = 2'-O-methyluridine-3'-phosphate
  modified_base 20: mod_base = OTHER; note = 2'-O-methylguanosine-3'-phosphate
  modified_base 21: mod_base = OTHER; note = 2'-O-methyluridine-3'-phosphate ((2S,4R)-1-[29-[[2-(acetylamino)-2-deoxy-beta-D-galactopyra nosyl]oxy]-14,14-bis[[3-[[3-[[5-[[2-(acetylamino)-2-deoxy-b eta-D-galactopyranosyl]oxy]-1-oxopentyl]amino]propyl]amino] -3-oxopropoxy]methyl]-1,12,19,25-tetraoxo-16-oxa-13,20,24-t riazanonacos-1-yl]-4-hydroxy-2-pyrrolidinyl)methyl ester
ttctgtgacctcttcatttgt

SEQ ID NO: 1697 - RNA, 21 nt, synthetic construct
  source 1..21: mol_type = other RNA
  modified_base 1: mod_base = OTHER; note = 2'-O-methylguanosine-3'-phosphorothioate
  modified_base 2: mod_base = OTHER; note = 2'-O-methyladenosine-3'-phosphorothioate
  modified_base 3: mod_base = OTHER; note = 2'-O-methylcytidine-3'-phosphate
  modified_base 4: mod_base = OTHER; note = 2'-O-methylcytidine-3'-phosphate
  modified_base 5: mod_base = OTHER; note = 2'-O-methyluridine-3'-phosphate
  modified_base 6: mod_base = OTHER; note = 2'-O-methylcytidine-3'-phosphate
  modified_base 7: mod_base = OTHER; note = 2'-deoxy-2'-fluorouridine-3'-phosphate
  modified_base 8: mod_base = OTHER; note = 2'-O-methyluridine-3'-phosphate
  modified_base 9: mod_base = OTHER; note = 2'-deoxy-2'-fluorocytidine-3'-phosphate
  modified_base 10: mod_base = OTHER; note = 2'-deoxy-2'-fluoroadenosine-3'-phosphate
  modified_base 11: mod_base = OTHER; note = 2'-deoxy-2'-fluorouridine-3'-phosphate
  modified_base 12: mod_base = OTHER; note = 2'-O-methyluridine-3'-phosphate
  modified_base 13: mod_base = OTHER; note = 2'-O-methyluridine-3'-phosphate
  modified_base 14: mod_base = OTHER; note = 2'-O-methylguanosine-3'-phosphate
  modified_base 15: mod_base = OTHER; note = 2'-O-methyluridine-3'-phosphate
  modified_base 16: mod_base = OTHER; note = 2'-O-methylguanosine-3'-phosphate
  modified_base 17: mod_base = OTHER; note = 2'-O-methylguanosine-3'-phosphate
  modified_base 18: mod_base = OTHER; note = 2'-O-methyladenosine-3'-phosphate
  modified_base 19: mod_base = OTHER; note = 2'-O-methylguanosine-3'-phosphate
  modified_base 20: mod_base = OTHER; note = 2'-O-methyluridine-3'-phosphate
  modified_base 21: mod_base = OTHER; note = 2'-O-methyluridine-3'-phosphate ((2S,4R)-1-[29-[[2-(acetylamino)-2-deoxy-beta-D-galactopyra nosyl]oxy]-14,14-bis[[3-[[3-[[5-[[2-(acetylamino)-2-deoxy-b eta-D-galactopyranosyl]oxy]-1-oxopentyl]amino]propyl]amino] -3-oxopropoxy]methyl]-1,12,19,25-tetraoxo-16-oxa-13,20,24-t riazanonacos-1-yl]-4-hydroxy-2-pyrrolidinyl)methyl ester
gacctcttcatttgtggagtt

SEQ ID NO: 1698 - RNA, 21 nt, synthetic construct
  source 1..21: mol_type = other RNA
  modified_base 1: mod_base = OTHER; note = 2'-O-methylcytidine-3'-phosphorothioate
  modified_base 2: mod_base = OTHER; note = 2'-O-methyluridine-3'-phosphorothioate
  modified_base 3: mod_base = OTHER; note = 2'-O-methyluridine-3'-phosphate
  modified_base 4: mod_base = OTHER; note = 2'-O-methylcytidine-3'-phosphate
  modified_base 5: mod_base = OTHER; note = 2'-O-methyladenosine-3'-phosphate
  modified_base 6: mod_base = OTHER; note = 2'-O-methyluridine-3'-phosphate
  modified_base 7: mod_base = OTHER; note = 2'-deoxy-2'-fluorouridine-3'-phosphate
  modified_base 8: mod_base = OTHER; note = 2'-O-methyluridine-3'-phosphate
  modified_base 9: mod_base = OTHER; note = 2'-deoxy-2'-fluoroguanosine-3'-phosphate
  modified_base 10: mod_base = OTHER; note = 2'-deoxy-2'-fluorouridine-3'-phosphate
  modified_base 11: mod_base = OTHER; note = 2'-deoxy-2'-fluoroguanosine-3'-phosphate
  modified_base 12: mod_base = OTHER; note = 2'-O-methylguanosine-3'-phosphate
  modified_base 13: mod_base = OTHER; note = 2'-O-methyladenosine-3'-phosphate
  modified_base 14: mod_base = OTHER; note = 2'-O-methylguanosine-3'-phosphate
  modified_base 15: mod_base = OTHER; note = 2'-O-methyluridine-3'-phosphate
  modified_base 16: mod_base = OTHER; note = 2'-O-methylguanosine-3'-phosphate
  modified_base 17: mod_base = OTHER; note = 2'-O-methyladenosine-3'-phosphate
  modified_base 18: mod_base = OTHER; note = 2'-O-methylcytidine-3'-phosphate
  modified_base 19: mod_base = OTHER; note = 2'-O-methyladenosine-3'-phosphate
  modified_base 20: mod_base = OTHER; note = 2'-O-methylguanosine-3'-phosphate
  modified_base 21: mod_base = OTHER; note = 2'-O-methyluridine-3'-phosphate ((2S,4R)-1-[29-[[2-(acetylamino)-2-deoxy-beta-D-galactopyra nosyl]oxy]-14,14-bis[[3-[[3-[[5-[[2-(acetylamino)-2-deoxy-b eta-D-galactopyranosyl]oxy]-1-oxopentyl]amino]propyl]amino] -3-oxopropoxy]methyl]-1,12,19,25-tetraoxo-16-oxa-13,20,24-t riazanonacos-1-yl]-4-hydroxy-2-pyrrolidinyl)methyl ester
cttcatttgtggagtgacagt

SEQ ID NO: 1699 - RNA, 21 nt, synthetic construct
  source 1..21: mol_type = other RNA
  modified_base 1: mod_base = OTHER; note = 2'-O-methylcytidine-3'-phosphorothioate
  modified_base 2: mod_base = OTHER; note = 2'-O-methyladenosine-3'-phosphorothioate
  modified_base 3: mod_base = OTHER; note = 2'-O-methyluridine-3'-phosphate
  modified_base 4: mod_base = OTHER; note = 2'-O-methylguanosine-3'-phosphate
  modified_base 5: mod_base = OTHER; note = 2'-O-methyluridine-3'-phosphate
  modified_base 6: mod_base = OTHER; note = 2'-O-methyluridine-3'-phosphate
  modified_base 7: mod_base = OTHER; note = 2'-deoxy-2'-fluorocytidine-3'-phosphate
  modified_base 8: mod_base = OTHER; note = 2'-O-methyladenosine-3'-phosphate
  modified_base 9: mod_base = OTHER; note = 2'-deoxy-2'-fluorocytidine-3'-phosphate
  modified_base 10: mod_base = OTHER; note = 2'-deoxy-2'-fluorocytidine-3'-phosphate
  modified_base 11: mod_base = OTHER; note = 2'-deoxy-2'-fluorouridine-3'-phosphate
  modified_base 12: mod_base = OTHER; note = 2'-O-methyluridine-3'-phosphate
  modified_base 13: mod_base = OTHER; note = 2'-O-methyluridine-3'-phosphate
  modified_base 14: mod_base = OTHER; note = 2'-O-methylguanosine-3'-phosphate
  modified_base 15: mod_base = OTHER; note = 2'-O-methyluridine-3'-phosphate
  modified_base 16: mod_base = OTHER; note = 2'-O-methylguanosine-3'-phosphate
  modified_base 17: mod_base = OTHER; note = 2'-O-methyluridine-3'-phosphate
  modified_base 18: mod_base = OTHER; note = 2'-O-methyluridine-3'-phosphate
  modified_base 19: mod_base = OTHER; note = 2'-O-methyladenosine-3'-phosphate
  modified_base 20: mod_base = OTHER; note = 2'-O-methyluridine-3'-phosphate
  modified_base 21: mod_base = OTHER; note = 2'-O-methyluridine-3'-phosphate ((2S,4R)-1-[29-[[2-(acetylamino)-2-deoxy-beta-D-galactopyra nosyl]oxy]-14,14-bis[[3-[[3-[[5-[[2-(acetylamino)-2-deoxy-b eta-D-galactopyranosyl]oxy]-1-oxopentyl]amino]propyl]amino] -3-oxopropoxy]methyl]-1,12,19,25-tetraoxo-16-oxa-13,20,24-t riazanonacos-1-yl]-4-hydroxy-2-pyrrolidinyl)methyl ester
catgttcacctttgtgttatt

SEQ ID NO: 1700 - RNA, 21 nt, synthetic construct
  source 1..21: mol_type = other RNA
  modified_base 1: mod_base = OTHER; note = 2'-O-methyluridine-3'-phosphorothioate
  modified_base 2: mod_base = OTHER; note = 2'-O-methylcytidine-3'-phosphorothioate
  modified_base 3: mod_base = OTHER; note = 2'-O-methyladenosine-3'-phosphate
  modified_base 4: mod_base = OTHER; note = 2'-O-methylcytidine-3'-phosphate
  modified_base 5: mod_base = OTHER; note = 2'-O-methylcytidine-3'-phosphate
  modified_base 6: mod_base = OTHER; note = 2'-O-methyluridine-3'-phosphate
  modified_base 7: mod_base = OTHER; note = 2'-deoxy-2'-fluorouridine-3'-phosphate
  modified_base 8: mod_base = OTHER; note = 2'-O-methyluridine-3'-phosphate
  modified_base 9: mod_base = OTHER; note = 2'-deoxy-2'-fluoroguanosine-3'-phosphate
  modified_base 10: mod_base = OTHER; note = 2'-deoxy-2'-fluorouridine-3'-phosphate
  modified_base 11: mod_base = OTHER; note = 2'-deoxy-2'-fluoroguanosine-3'-phosphate
  modified_base 12: mod_base = OTHER; note = 2'-O-methyluridine-3'-phosphate
  modified_base 13: mod_base = OTHER; note = 2'-O-methyluridine-3'-phosphate
  modified_base 14: mod_base = OTHER; note = 2'-O-methyladenosine-3'-phosphate
  modified_base 15: mod_base = OTHER; note = 2'-O-methyluridine-3'-phosphate
  modified_base 16: mod_base = OTHER; note = 2'-O-methyluridine-3'-phosphate
  modified_base 17: mod_base = OTHER; note = 2'-O-methylcytidine-3'-phosphate
  modified_base 18: mod_base = OTHER; note = 2'-O-methyluridine-3'-phosphate
  modified_base 19: mod_base = OTHER; note = 2'-O-methyluridine-3'-phosphate
  modified_base 20: mod_base = OTHER; note = 2'-O-methylcytidine-3'-phosphate
  modified_base 21: mod_base = OTHER; note = 2'-O-methyluridine-3'-phosphate ((2S,4R)-1-[29-[[2-(acetylamino)-2-deoxy-beta-D-galactopyra nosyl]oxy]-14,14-bis[[3-[[3-[[5-[[2-(acetylamino)-2-deoxy-b eta-D-galactopyranosyl]oxy]-1-oxopentyl]amino]propyl]amino] -3-oxopropoxy]methyl]-1,12,19,25-tetraoxo-16-oxa-13,20,24-t riazanonacos-1-yl]-4-hydroxy-2-pyrrolidinyl)methyl ester
tcacctttgtgttattcttct

SEQ ID NO: 1701 - RNA, 21 nt, synthetic construct
  source 1..21: mol_type = other RNA
  modified_base 1: mod_base = OTHER; note = 2'-O-methyluridine-3'-phosphorothioate
  modified_base 2: mod_base = OTHER; note = 2'-O-methyluridine-3'-phosphorothioate
  modified_base 3: mod_base = OTHER; note = 2'-O-methyluridine-3'-phosphate
  modified_base 4: mod_base = OTHER; note = 2'-O-methylguanosine-3'-phosphate
  modified_base 5: mod_base = OTHER; note = 2'-O-methyluridine-3'-phosphate
  modified_base 6: mod_base = OTHER; note = 2'-O-methylguanosine-3'-phosphate
  modified_base 7: mod_base = OTHER; note = 2'-deoxy-2'-fluorouridine-3'-phosphate
  modified_base 8: mod_base = OTHER; note = 2'-O-methyluridine-3'-phosphate
  modified_base 9: mod_base = OTHER; note = 2'-deoxy-2'-fluoroadenosine-3'-phosphate
  modified_base 10: mod_base = OTHER; note = 2'-deoxy-2'-fluorouridine-3'-phosphate
  modified_base 11: mod_base = OTHER; note = 2'-deoxy-2'-fluorouridine-3'-phosphate
  modified_base 12: mod_base = OTHER; note = 2'-O-methylcytidine-3'-phosphate
  modified_base 13: mod_base = OTHER; note = 2'-O-methyluridine-3'-phosphate
  modified_base 14: mod_base = OTHER; note = 2'-O-methyluridine-3'-phosphate
  modified_base 15: mod_base = OTHER; note = 2'-O-methylcytidine-3'-phosphate
  modified_base 16: mod_base = OTHER; note = 2'-O-methyladenosine-3'-phosphate
  modified_base 17: mod_base = OTHER; note = 2'-O-methylguanosine-3'-phosphate
  modified_base 18: mod_base = OTHER; note = 2'-O-methylcytidine-3'-phosphate
  modified_base 19: mod_base = OTHER; note = 2'-O-methyluridine-3'-phosphate
  modified_base 20: mod_base = OTHER; note = 2'-O-methylcytidine-3'-phosphate
  modified_base 21: mod_base = OTHER; note = 2'-O-methyluridine-3'-phosphate ((2S,4R)-1-[29-[[2-(acetylamino)-2-deoxy-beta-D-galactopyra nosyl]oxy]-14,14-bis[[3-[[3-[[5-[[2-(acetylamino)-2-deoxy-b eta-D-galactopyranosyl]oxy]-1-oxopentyl]amino]propyl]amino] -3-oxopropoxy]methyl]-1,12,19,25-tetraoxo-16-oxa-13,20,24-t riazanonacos-1-yl]-4-hydroxy-2-pyrrolidinyl)methyl ester
tttgtgttattcttcagctct

SEQ ID NO: 1702 - RNA, 21 nt, synthetic construct
  source 1..21: mol_type = other RNA
  modified_base 1: mod_base = OTHER; note = 2'-O-methylguanosine-3'-phosphorothioate
  modified_base 2: mod_base = OTHER; note = 2'-O-methyluridine-3'-phosphorothioate
  modified_base 3: mod_base = OTHER; note = 2'-O-methyluridine-3'-phosphate
  modified_base 4: mod_base = OTHER; note = 2'-O-methyladenosine-3'-phosphate
  modified_base 5: mod_base = OTHER; note = 2'-O-methyluridine-3'-phosphate
  modified_base 6: mod_base = OTHER; note = 2'-O-methyluridine-3'-phosphate
  modified_base 7: mod_base = OTHER; note = 2'-deoxy-2'-fluorocytidine-3'-phosphate
  modified_base 8: mod_base = OTHER; note = 2'-O-methyluridine-3'-phosphate
  modified_base 9: mod_base = OTHER; note = 2'-deoxy-2'-fluorouridine-3'-phosphate
  modified_base 10: mod_base = OTHER; note = 2'-deoxy-2'-fluorocytidine-3'-phosphate
  modified_base 11: mod_base = OTHER; note = 2'-deoxy-2'-fluoroadenosine-3'-phosphate
  modified_base 12: mod_base = OTHER; note = 2'-O-methylguanosine-3'-phosphate
  modified_base 13: mod_base = OTHER; note = 2'-O-methylcytidine-3'-phosphate
  modified_base 14: mod_base = OTHER; note = 2'-O-methyluridine-3'-phosphate
  modified_base 15: mod_base = OTHER; note = 2'-O-methylcytidine-3'-phosphate
  modified_base 16: mod_base = OTHER; note = 2'-O-methyladenosine-3'-phosphate
  modified_base 17: mod_base = OTHER; note = 2'-O-methylguanosine-3'-phosphate
  modified_base 18: mod_base = OTHER; note = 2'-O-methylcytidine-3'-phosphate
  modified_base 19: mod_base = OTHER; note = 2'-O-methylcytidine-3'-phosphate
  modified_base 20: mod_base = OTHER; note = 2'-O-methyladenosine-3'-phosphate
  modified_base 21: mod_base = OTHER; note = 2'-O-methyluridine-3'-phosphate ((2S,4R)-1-[29-[[2-(acetylamino)-2-deoxy-beta-D-galactopyra nosyl]oxy]-14,14-bis[[3-[[3-[[5-[[2-(acetylamino)-2-deoxy-b eta-D-galactopyranosyl]oxy]-1-oxopentyl]amino]propyl]amino] -3-oxopropoxy]methyl]-1,12,19,25-tetraoxo-16-oxa-13,20,24-t riazanonacos-1-yl]-4-hydroxy-2-pyrrolidinyl)methyl ester
gttattcttcagctcagccat

SEQ ID NO: 1703 - RNA, 21 nt, synthetic construct
  source 1..21: mol_type = other RNA
  modified_base 1: mod_base = OTHER; note = 2'-O-methylcytidine-3'-phosphorothioate
  modified_base 2: mod_base = OTHER; note = 2'-O-methyladenosine-3'-phosphorothioate
  modified_base 3: mod_base = OTHER; note = 2'-O-methylguanosine-3'-phosphate
  modified_base 4: mod_base = OTHER; note = 2'-O-methylcytidine-3'-phosphate
  modified_base 5: mod_base = OTHER; note = 2'-O-methyluridine-3'-phosphate
  modified_base 6: mod_base = OTHER; note = 2'-O-methylcytidine-3'-phosphate
  modified_base 7: mod_base = OTHER; note = 2'-deoxy-2'-fluoroadenosine-3'-phosphate
  modified_base 8: mod_base = OTHER; note = 2'-O-methylguanosine-3'-phosphate
  modified_base 9: mod_base = OTHER; note = 2'-deoxy-2'-fluorocytidine-3'-phosphate
  modified_base 10: mod_base = OTHER; note = 2'-deoxy-2'-fluorocytidine-3'-phosphate
  modified_base 11: mod_base = OTHER; note = 2'-deoxy-2'-fluoroadenosine-3'-phosphate
  modified_base 12: mod_base = OTHER; note = 2'-O-methylguanosine-3'-phosphate
  modified_base 13: mod_base = OTHER; note = 2'-O-methyluridine-3'-phosphate
  modified_base 14: mod_base = OTHER; note = 2'-O-methyladenosine-3'-phosphate
  modified_base 15: mod_base = OTHER; note = 2'-O-methylguanosine-3'-phosphate
  modified_base 16: mod_base = OTHER; note = 2'-O-methyluridine-3'-phosphate
  modified_base 17: mod_base = OTHER; note = 2'-O-methyladenosine-3'-phosphate
  modified_base 18: mod_base = OTHER; note = 2'-O-methyluridine-3'-phosphate
  modified_base 19: mod_base = OTHER; note = 2'-O-methylcytidine-3'-phosphate
  modified_base 20: mod_base = OTHER; note = 2'-O-methylcytidine-3'-phosphate
  modified_base 21: mod_base = OTHER; note = 2'-O-methyluridine-3'-phosphate ((2S,4R)-1-[29-[[2-(acetylamino)-2-deoxy-beta-D-galactopyra nosyl]oxy]-14,14-bis[[3-[[3-[[5-[[2-(acetylamino)-2-deoxy-b eta-D-galactopyranosyl]oxy]-1-oxopentyl]amino]propyl]amino] -3-oxopropoxy]methyl]-1,12,19,25-tetraoxo-16-oxa-13,20,24-t riazanonacos-1-yl]-4-hydroxy-2-pyrrolidinyl)methyl ester
cagctcagccagtagtatcct

SEQ ID NO: 1704 - RNA, 21 nt, synthetic construct
  source 1..21: mol_type = other RNA
  modified_base 1: mod_base = OTHER; note = 2'-O-methylcytidine-3'-phosphorothioate
  modified_base 2: mod_base = OTHER; note = 2'-O-methyladenosine-3'-phosphorothioate
  modified_base 3: mod_base = OTHER; note = 2'-O-methylguanosine-3'-phosphate
  modified_base 4: mod_base = OTHER; note = 2'-O-methylcytidine-3'-phosphate
  modified_base 5: mod_base = OTHER; note = 2'-O-methylcytidine-3'-phosphate
  modified_base 6: mod_base = OTHER; note = 2'-O-methyladenosine-3'-phosphate
  modified_base 7: mod_base = OTHER; note = 2'-deoxy-2'-fluoroguanosine-3'-phosphate
  modified_base 8: mod_base = OTHER; note = 2'-O-methyluridine-3'-phosphate
  modified_base 9: mod_base = OTHER; note = 2'-deoxy-2'-fluoroadenosine-3'-phosphate
  modified_base 10: mod_base = OTHER; note = 2'-deoxy-2'-fluoroguanosine-3'-phosphate
  modified_base 11: mod_base = OTHER; note = 2'-deoxy-2'-fluorouridine-3'-phosphate
  modified_base 12: mod_base = OTHER; note = 2'-O-methyladenosine-3'-phosphate
  modified_base 13: mod_base = OTHER; note = 2'-O-methyluridine-3'-phosphate
  modified_base 14: mod_base = OTHER; note = 2'-O-methylcytidine-3'-phosphate
  modified_base 15: mod_base = OTHER; note = 2'-O-methylcytidine-3'-phosphate
  modified_base 16: mod_base = OTHER; note = 2'-O-methylcytidine-3'-phosphate
  modified_base 17: mod_base = OTHER; note = 2'-O-methylguanosine-3'-phosphate
  modified_base 18: mod_base = OTHER; note = 2'-O-methylguanosine-3'-phosphate
  modified_base 19: mod_base = OTHER; note = 2'-O-methyladenosine-3'-phosphate
  modified_base 20: mod_base = OTHER; note = 2'-O-methyluridine-3'-phosphate
  modified_base 21: mod_base = OTHER; note = 2'-O-methyluridine-3'-phosphate ((2S,4R)-1-[29-[[2-(acetylamino)-2-deoxy-beta-D-galactopyra nosyl]oxy]-14,14-bis[[3-[[3-[[5-[[2-(acetylamino)-2-deoxy-b eta-D-galactopyranosyl]oxy]-1-oxopentyl]amino]propyl]amino] -3-oxopropoxy]methyl]-1,12,19,25-tetraoxo-16-oxa-13,20,24-t riazanonacos-1-yl]-4-hydroxy-2-pyrrolidinyl)methyl ester
cagccagtagtatcccggatt

SEQ ID NO: 1705 - RNA, 21 nt, synthetic construct
  source 1..21: mol_type = other RNA
  modified_base 1: mod_base = OTHER; note = 2'-O-methyluridine-3'-phosphorothioate
  modified_base 2: mod_base = OTHER; note = 2'-O-methyladenosine-3'-phosphorothioate
  modified_base 3: mod_base = OTHER; note = 2'-O-methylguanosine-3'-phosphate
  modified_base 4: mod_base = OTHER; note = 2'-O-methyluridine-3'-phosphate
  modified_base 5: mod_base = OTHER; note = 2'-O-methyladenosine-3'-phosphate
  modified_base 6: mod_base = OTHER; note = 2'-O-methyluridine-3'-phosphate
  modified_base 7: mod_base = OTHER; note = 2'-deoxy-2'-fluorocytidine-3'-phosphate
  modified_base 8: mod_base = OTHER; note = 2'-O-methylcytidine-3'-phosphate
  modified_base 9: mod_base = OTHER; note = 2'-deoxy-2'-fluorocytidine-3'-phosphate
  modified_base 10: mod_base = OTHER; note = 2'-deoxy-2'-fluoroguanosine-3'-phosphate
  modified_base 11: mod_base = OTHER; note = 2'-deoxy-2'-fluoroguanosine-3'-phosphate
  modified_base 12: mod_base = OTHER; note = 2'-O-methyladenosine-3'-phosphate
  modified_base 13: mod_base = OTHER; note = 2'-O-methyluridine-3'-phosphate
  modified_base 14: mod_base = OTHER; note = 2'-O-methylguanosine-3'-phosphate
  modified_base 15: mod_base = OTHER; note = 2'-O-methylcytidine-3'-phosphate
  modified_base 16: mod_base = OTHER; note = 2'-O-methyluridine-3'-phosphate
  modified_base 17: mod_base = OTHER; note = 2'-O-methyluridine-3'-phosphate
  modified_base 18: mod_base = OTHER; note = 2'-O-methyluridine-3'-phosphate
  modified_base 19: mod_base = OTHER; note = 2'-O-methylcytidine-3'-phosphate
  modified_base 20: mod_base = OTHER; note = 2'-O-methyluridine-3'-phosphate
  modified_base 21: mod_base = OTHER; note = 2'-O-methyluridine-3'-phosphate ((2S,4R)-1-[29-[[2-(acetylamino)-2-deoxy-beta-D-galactopyra nosyl]oxy]-14,14-bis[[3-[[3-[[5-[[2-(acetylamino)-2-deoxy-b eta-D-galactopyranosyl]oxy]-1-oxopentyl]amino]propyl]amino] -3-oxopropoxy]methyl]-1,12,19,25-tetraoxo-16-oxa-13,20,24-t riazanonacos-1-yl]-4-hydroxy-2-pyrrolidinyl)methyl ester
tagtatcccggatgctttctt

SEQ ID NO: 1706 - RNA, 21 nt, synthetic construct
  source 1..21: mol_type = other RNA
  modified_base 1: mod_base = OTHER; note = 2'-O-methyluridine-3'-phosphorothioate
  modified_base 2: mod_base = OTHER; note = 2'-O-methylcytidine-3'-phosphorothioate
  modified_base 3: mod_base = OTHER; note = 2'-O-methylcytidine-3'-phosphate
  modified_base 4: mod_base = OTHER; note = 2'-O-methylcytidine-3'-phosphate
  modified_base 5: mod_base = OTHER; note = 2'-O-methylguanosine-3'-phosphate
  modified_base 6: mod_base = OTHER; note = 2'-O-methylguanosine-3'-phosphate
  modified_base 7: mod_base = OTHER; note = 2'-deoxy-2'-fluoroadenosine-3'-phosphate
  modified_base 8: mod_base = OTHER; note = 2'-O-methyluridine-3'-phosphate
  modified_base 9: mod_base = OTHER; note = 2'-deoxy-2'-fluoroguanosine-3'-phosphate
  modified_base 10: mod_base = OTHER; note = 2'-deoxy-2'-fluorocytidine-3'-phosphate
  modified_base 11: mod_base = OTHER; note = 2'-deoxy-2'-fluorouridine-3'-phosphate
  modified_base 12: mod_base = OTHER; note = 2'-O-methyluridine-3'-phosphate
  modified_base 13: mod_base = OTHER; note = 2'-O-methyluridine-3'-phosphate
  modified_base 14: mod_base = OTHER; note = 2'-O-methylcytidine-3'-phosphate
  modified_base 15: mod_base = OTHER; note = 2'-O-methyluridine-3'-phosphate
  modified_base 16: mod_base = OTHER; note = 2'-O-methylguanosine-3'-phosphate
  modified_base 17: mod_base = OTHER; note = 2'-O-methylcytidine-3'-phosphate
  modified_base 18: mod_base = OTHER; note = 2'-O-methyluridine-3'-phosphate
  modified_base 19: mod_base = OTHER; note = 2'-O-methyluridine-3'-phosphate
  modified_base 20: mod_base = OTHER; note = 2'-O-methylcytidine-3'-phosphate
  modified_base 21: mod_base = OTHER; note = 2'-O-methyluridine-3'-phosphate ((2S,4R)-1-[29-[[2-(acetylamino)-2-deoxy-beta-D-galactopyra nosyl]oxy]-14,14-bis[[3-[[3-[[5-[[2-(acetylamino)-2-deoxy-b eta-D-galactopyranosyl]oxy]-1-oxopentyl]amino]propyl]amino] -3-oxopropoxy]methyl]-1,12,19,25-tetraoxo-16-oxa-13,20,24-t riazanonacos-1-yl]-4-hydroxy-2-pyrrolidinyl)methyl ester
tcccggatgctttctgcttct

SEQ ID NO: 1707 - RNA, 21 nt, synthetic construct
  source 1..21: mol_type = other RNA
  modified_base 1: mod_base = OTHER; note = 2'-O-methylguanosine-3'-phosphorothioate
  modified_base 2: mod_base = OTHER; note = 2'-O-methyladenosine-3'-phosphorothioate
  modified_base 3: mod_base = OTHER; note = 2'-O-methyluridine-3'-phosphate
  modified_base 4: mod_base = OTHER; note = 2'-O-methylguanosine-3'-phosphate
  modified_base 5: mod_base = OTHER; note = 2'-O-methylcytidine-3'-phosphate
  modified_base 6: mod_base = OTHER; note = 2'-O-methyluridine-3'-phosphate
  modified_base 7: mod_base = OTHER; note = 2'-deoxy-2'-fluorouridine-3'-phosphate
  modified_base 8: mod_base = OTHER; note = 2'-O-methyluridine-3'-phosphate
  modified_base 9: mod_base = OTHER; note = 2'-deoxy-2'-fluorocytidine-3'-phosphate
  modified_base 10: mod_base = OTHER; note = 2'-deoxy-2'-fluorouridine-3'-phosphate
  modified_base 11: mod_base = OTHER; note = 2'-deoxy-2'-fluoroguanosine-3'-phosphate
  modified_base 12: mod_base = OTHER; note = 2'-O-methylcytidine-3'-phosphate
  modified_base 13: mod_base = OTHER; note = 2'-O-methyluridine-3'-phosphate
  modified_base 14: mod_base = OTHER; note = 2'-O-methyluridine-3'-phosphate
  modified_base 15: mod_base = OTHER; note = 2'-O-methylcytidine-3'-phosphate
  modified_base 16: mod_base = OTHER; note = 2'-O-methyladenosine-3'-phosphate
  modified_base 17: mod_base = OTHER; note = 2'-O-methylcytidine-3'-phosphate
  modified_base 18: mod_base = OTHER; note = 2'-O-methyluridine-3'-phosphate
  modified_base 19: mod_base = OTHER; note = 2'-O-methyluridine-3'-phosphate
  modified_base 20: mod_base = OTHER; note = 2'-O-methyluridine-3'-phosphate
  modified_base 21: mod_base = OTHER; note = 2'-O-methyluridine-3'-phosphate ((2S,4R)-1-[29-[[2-(acetylamino)-2-deoxy-beta-D-galactopyra nosyl]oxy]-14,14-bis[[3-[[3-[[5-[[2-(acetylamino)-2-deoxy-b eta-D-galactopyranosyl]oxy]-1-oxopentyl]amino]propyl]amino] -3-oxopropoxy]methyl]-1,12,19,25-tetraoxo-16-oxa-13,20,24-t riazanonacos-1-yl]-4-hydroxy-2-pyrrolidinyl)methyl ester
gatgctttctgcttcactttt

SEQ ID NO: 1708 - RNA, 21 nt, synthetic construct
  source 1..21: mol_type = other RNA
  modified_base 1: mod_base = OTHER; note = 2'-O-methyluridine-3'-phosphorothioate
  modified_base 2: mod_base = OTHER; note = 2'-O-methyluridine-3'-phosphorothioate
  modified_base 3: mod_base = OTHER; note = 2'-O-methyluridine-3'-phosphate
  modified_base 4: mod_base = OTHER; note = 2'-O-methylcytidine-3'-phosphate
  modified_base 5: mod_base = OTHER; note = 2'-O-methyluridine-3'-phosphate
  modified_base 6: mod_base = OTHER; note = 2'-O-methylguanosine-3'-phosphate
  modified_base 7: mod_base = OTHER; note = 2'-deoxy-2'-fluorocytidine-3'-phosphate
  modified_base 8: mod_base = OTHER; note = 2'-O-methyluridine-3'-phosphate
  modified_base 9: mod_base = OTHER; note = 2'-deoxy-2'-fluorouridine-3'-phosphate
  modified_base 10: mod_base = OTHER; note = 2'-deoxy-2'-fluorocytidine-3'-phosphate
  modified_base 11: mod_base = OTHER; note = 2'-deoxy-2'-fluoroadenosine-3'-phosphate
  modified_base 12: mod_base = OTHER; note = 2'-O-methylcytidine-3'-phosphate
  modified_base 13: mod_base = OTHER; note = 2'-O-methyluridine-3'-phosphate
  modified_base 14: mod_base = OTHER; note = 2'-O-methyluridine-3'-phosphate
  modified_base 15: mod_base = OTHER; note = 2'-O-methyluridine-3'-phosphate
  modified_base 16: mod_base = OTHER; note = 2'-O-methylcytidine-3'-phosphate
  modified_base 17: mod_base = OTHER; note = 2'-O-methylcytidine-3'-phosphate
  modified_base 18: mod_base = OTHER; note = 2'-O-methyladenosine-3'-phosphate
  modified_base 19: mod_base = OTHER; note = 2'-O-methyluridine-3'-phosphate
  modified_base 20: mod_base = OTHER; note = 2'-O-methylcytidine-3'-phosphate
  modified_base 21: mod_base = OTHER; note = 2'-O-methyluridine-3'-phosphate ((2S,4R)-1-[29-[[2-(acetylamino)-2-deoxy-beta-D-galactopyra nosyl]oxy]-14,14-bis[[3-[[3-[[5-[[2-(acetylamino)-2-deoxy-b eta-D-galactopyranosyl]oxy]-1-oxopentyl]amino]propyl]amino] -3-oxopropoxy]methyl]-1,12,19,25-tetraoxo-16-oxa-13,20,24-t riazanonacos-1-yl]-4-hydroxy-2-pyrrolidinyl)methyl ester
tttctgcttcactttccatct

SEQ ID NO: 1709 - RNA, 21 nt, synthetic construct
  source 1..21: mol_type = other RNA
  modified_base 1: mod_base = OTHER; note = 2'-O-methylcytidine-3'-phosphorothioate
  modified_base 2: mod_base = OTHER; note = 2'-O-methyladenosine-3'-phosphorothioate
  modified_base 3: mod_base = OTHER; note = 2'-O-methylcytidine-3'-phosphate
  modified_base 4: mod_base = OTHER; note = 2'-O-methyluridine-3'-phosphate
  modified_base 5: mod_base = OTHER; note = 2'-O-methyluridine-3'-phosphate
  modified_base 6: mod_base = OTHER; note = 2'-O-methyluridine-3'-phosphate
  modified_base 7: mod_base = OTHER; note = 2'-deoxy-2'-fluorocytidine-3'-phosphate
  modified_base 8: mod_base = OTHER; note = 2'-O-methylcytidine-3'-phosphate
  modified_base 9: mod_base = OTHER; note = 2'-deoxy-2'-fluoroadenosine-3'-phosphate
  modified_base 10: mod_base = OTHER; note = 2'-deoxy-2'-fluorouridine-3'-phosphate
  modified_base 11: mod_base = OTHER; note = 2'-deoxy-2'-fluorocytidine-3'-phosphate
  modified_base 12: mod_base = OTHER; note = 2'-O-methyluridine-3'-phosphate
  modified_base 13: mod_base = OTHER; note = 2'-O-methylcytidine-3'-phosphate
  modified_base 14: mod_base = OTHER; note = 2'-O-methyladenosine-3'-phosphate
  modified_base 15: mod_base = OTHER; note = 2'-O-methylcytidine-3'-phosphate
  modified_base 16: mod_base = OTHER; note = 2'-O-methylcytidine-3'-phosphate
  modified_base 17: mod_base = OTHER; note = 2'-O-methyladenosine-3'-phosphate
  modified_base 18: mod_base = OTHER; note = 2'-O-methylguanosine-3'-phosphate
  modified_base 19: mod_base = OTHER; note = 2'-O-methyluridine-3'-phosphate
  modified_base 20: mod_base = OTHER; note = 2'-O-methyluridine-3'-phosphate
  modified_base 21: mod_base = OTHER; note = 2'-O-methyluridine-3'-phosphate ((2S,4R)-1-[29-[[2-(acetylamino)-2-deoxy-beta-D-galactopyra nosyl]oxy]-14,14-bis[[3-[[3-[[5-[[2-(acetylamino)-2-deoxy-b eta-D-galactopyranosyl]oxy]-1-oxopentyl]amino]propyl]amino] -3-oxopropoxy]methyl]-1,12,19,25-tetraoxo-16-oxa-13,20,24-t riazanonacos-1-yl]-4-hydroxy-2-pyrrolidinyl)methyl ester
cactttccatctcaccagttt

SEQ ID NO: 1710 - RNA, 21 nt, synthetic construct
  source 1..21: mol_type = other RNA
  modified_base 1: mod_base = OTHER; note = 2'-O-methylcytidine-3'-phosphorothioate
  modified_base 2: mod_base = OTHER; note = 2'-O-methylcytidine-3'-phosphorothioate
  modified_base 3: mod_base = OTHER; note = 2'-O-methyladenosine-3'-phosphate
  modified_base 4: mod_base = OTHER; note = 2'-O-methyluridine-3'-phosphate
  modified_base 5: mod_base = OTHER; note = 2'-O-methylcytidine-3'-phosphate
  modified_base 6: mod_base = OTHER; note = 2'-O-methyluridine-3'-phosphate
  modified_base 7: mod_base = OTHER; note = 2'-deoxy-2'-fluorocytidine-3'-phosphate
  modified_base 8: mod_base = OTHER; note = 2'-O-methyladenosine-3'-phosphate
  modified_base 9: mod_base = OTHER; note = 2'-deoxy-2'-fluorocytidine-3'-phosphate
  modified_base 10: mod_base = OTHER; note = 2'-deoxy-2'-fluorocytidine-3'-phosphate
  modified_base 11: mod_base = OTHER; note = 2'-deoxy-2'-fluoroadenosine-3'-phosphate
  modified_base 12: mod_base = OTHER; note = 2'-O-methylguanosine-3'-phosphate
  modified_base 13: mod_base = OTHER; note = 2'-O-methyluridine-3'-phosphate
  modified_base 14: mod_base = OTHER; note = 2'-O-methyluridine-3'-phosphate
  modified_base 15: mod_base = OTHER; note = 2'-O-methylcytidine-3'-phosphate
  modified_base 16: mod_base = OTHER; note = 2'-O-methyladenosine-3'-phosphate
  modified_base 17: mod_base = OTHER; note = 2'-O-methylguanosine-3'-phosphate
  modified_base 18: mod_base = OTHER; note = 2'-O-methylguanosine-3'-phosphate
  modified_base 19: mod_base = OTHER; note = 2'-O-methylcytidine-3'-phosphate
  modified_base 20: mod_base = OTHER; note = 2'-O-methyluridine-3'-phosphate
  modified_base 21: mod_base = OTHER; note = 2'-O-methyluridine-3'-phosphate ((2S,4R)-1-[29-[[2-(acetylamino)-2-deoxy-beta-D-galactopyra nosyl]oxy]-14,14-bis[[3-[[3-[[5-[[2-(acetylamino)-2-deoxy-b eta-D-galactopyranosyl]oxy]-1-oxopentyl]amino]propyl]amino] -3-oxopropoxy]methyl]-1,12,19,25-tetraoxo-16-oxa-13,20,24-t riazanonacos-1-yl]-4-hydroxy-2-pyrrolidinyl)methyl ester
ccatctcaccagttcaggctt

SEQ ID NO: 1711 - RNA, 21 nt, synthetic construct
  source 1..21: mol_type = other RNA
  modified_base 1: mod_base = OTHER; note = 2'-O-methyluridine-3'-phosphorothioate
  modified_base 2: mod_base = OTHER; note = 2'-O-methylcytidine-3'-phosphorothioate
  modified_base 3: mod_base = OTHER; note = 2'-O-methyladenosine-3'-phosphate
  modified_base 4: mod_base = OTHER; note = 2'-O-methylcytidine-3'-phosphate
  modified_base 5: mod_base = OTHER; note = 2'-O-methylcytidine-3'-phosphate
  modified_base 6: mod_base = OTHER; note = 2'-O-methyladenosine-3'-phosphate
  modified_base 7: mod_base = OTHER; note = 2'-deoxy-2'-fluoroguanosine-3'-phosphate
  modified_base 8: mod_base = OTHER; note = 2'-O-methyluridine-3'-phosphate
  modified_base 9: mod_base = OTHER; note = 2'-deoxy-2'-fluorouridine-3'-phosphate
  modified_base 10: mod_base = OTHER; note = 2'-deoxy-2'-fluorocytidine-3'-phosphate
  modified_base 11: mod_base = OTHER; note = 2'-deoxy-2'-fluoroadenosine-3'-phosphate
  modified_base 12: mod_base = OTHER; note = 2'-O-methylguanosine-3'-phosphate
  modified_base 13: mod_base = OTHER; note = 2'-O-methylguanosine-3'-phosphate
  modified_base 14: mod_base = OTHER; note = 2'-O-methylcytidine-3'-phosphate
  modified_base 15: mod_base = OTHER; note = 2'-O-methyluridine-3'-phosphate
  modified_base 16: mod_base = OTHER; note = 2'-O-methyluridine-3'-phosphate
  modified_base 17: mod_base = OTHER; note = 2'-O-methylcytidine-3'-phosphate
  modified_base 18: mod_base = OTHER; note = 2'-O-methyladenosine-3'-phosphate
  modified_base 19: mod_base = OTHER; note = 2'-O-methyluridine-3'-phosphate
  modified_base 20: mod_base = OTHER; note = 2'-O-methylcytidine-3'-phosphate
  modified_base 21: mod_base = OTHER; note = 2'-O-methyluridine-3'-phosphate ((2S,4R)-1-[29-[[2-(acetylamino)-2-deoxy-beta-D-galactopyra nosyl]oxy]-14,14-bis[[3-[[3-[[5-[[2-(acetylamino)-2-deoxy-b eta-D-galactopyranosyl]oxy]-1-oxopentyl]amino]propyl]amino] -3-oxopropoxy]methyl]-1,12,19,25-tetraoxo-16-oxa-13,20,24-t riazanonacos-1-yl]-4-hydroxy-2-pyrrolidinyl)methyl ester
tcaccagttcaggcttcatct

SEQ ID NO: 1712 - RNA, 21 nt, synthetic construct
  source 1..21: mol_type = other RNA
  modified_base 1: mod_base = OTHER; note = 2'-O-methyladenosine-3'-phosphorothioate
  modified_base 2: mod_base = OTHER; note = 2'-O-methylguanosine-3'-phosphorothioate
  modified_base 3: mod_base = OTHER; note = 2'-O-methyluridine-3'-phosphate
  modified_base 4: mod_base = OTHER; note = 2'-O-methyluridine-3'-phosphate
  modified_base 5: mod_base = OTHER; note = 2'-O-methylcytidine-3'-phosphate
  modified_base 6: mod_base = OTHER; note = 2'-O-methyladenosine-3'-phosphate
  modified_base 7: mod_base = OTHER; note = 2'-deoxy-2'-fluoroguanosine-3'-phosphate
  modified_base 8: mod_base = OTHER; note = 2'-O-methylguanosine-3'-phosphate
  modified_base 9: mod_base = OTHER; note = 2'-deoxy-2'-fluorocytidine-3'-phosphate
  modified_base 10: mod_base = OTHER; note = 2'-deoxy-2'-fluorouridine-3'-phosphate
  modified_base 11: mod_base = OTHER; note = 2'-deoxy-2'-fluorouridine-3'-phosphate
  modified_base 12: mod_base = OTHER; note = 2'-O-methylcytidine-3'-phosphate
  modified_base 13: mod_base = OTHER; note = 2'-O-methyladenosine-3'-phosphate
  modified_base 14: mod_base = OTHER; note = 2'-O-methyluridine-3'-phosphate
  modified_base 15: mod_base = OTHER; note = 2'-O-methylcytidine-3'-phosphate
  modified_base 16: mod_base = OTHER; note = 2'-O-methyladenosine-3'-phosphate
  modified_base 17: mod_base = OTHER; note = 2'-O-methyluridine-3'-phosphate
  modified_base 18: mod_base = OTHER; note = 2'-O-methylcytidine-3'-phosphate
  modified_base 19: mod_base = OTHER; note = 2'-O-methyladenosine-3'-phosphate
  modified_base 20: mod_base = OTHER; note = 2'-O-methyluridine-3'-phosphate
  modified_base 21: mod_base = OTHER; note = 2'-O-methyluridine-3'-phosphate ((2S,4R)-1-[29-[[2-(acetylamino)-2-deoxy-beta-D-galactopyra nosyl]oxy]-14,14-bis[[3-[[3-[[5-[[2-(acetylamino)-2-deoxy-b eta-D-galactopyranosyl]oxy]-1-oxopentyl]amino]propyl]amino] -3-oxopropoxy]methyl]-1,12,19,25-tetraoxo-16-oxa-13,20,24-t riazanonacos-1-yl]-4-hydroxy-2-pyrrolidinyl)methyl ester
agttcaggcttcatcatcatt

SEQ ID NO: 1713 - RNA, 21 nt, synthetic construct
  source 1..21: mol_type = other RNA
  modified_base 1: mod_base = OTHER; note = 2'-O-methyladenosine-3'-phosphorothioate
  modified_base 2: mod_base = OTHER; note = 2'-O-methylguanosine-3'-phosphorothioate
  modified_base 3: mod_base = OTHER; note = 2'-O-methylguanosine-3'-phosphate
  modified_base 4: mod_base = OTHER; note = 2'-O-methylcytidine-3'-phosphate
  modified_base 5: mod_base = OTHER; note = 2'-O-methyluridine-3'-phosphate
  modified_base 6: mod_base = OTHER; note = 2'-O-methyluridine-3'-phosphate
  modified_base 7: mod_base = OTHER; note = 2'-deoxy-2'-fluorocytidine-3'-phosphate
  modified_base 8: mod_base = OTHER; note = 2'-O-methyladenosine-3'-phosphate
  modified_base 9: mod_base = OTHER; note = 2'-deoxy-2'-fluorouridine-3'-phosphate
  modified_base 10: mod_base = OTHER; note = 2'-deoxy-2'-fluorocytidine-3'-phosphate
  modified_base 11: mod_base = OTHER; note = 2'-deoxy-2'-fluoroadenosine-3'-phosphate
  modified_base 12: mod_base = OTHER; note = 2'-O-methyluridine-3'-phosphate
  modified_base 13: mod_base = OTHER; note = 2'-O-methylcytidine-3'-phosphate
  modified_base 14: mod_base = OTHER; note = 2'-O-methyladenosine-3'-phosphate
  modified_base 15: mod_base = OTHER; note = 2'-O-methyluridine-3'-phosphate
  modified_base 16: mod_base = OTHER; note = 2'-O-methylguanosine-3'-phosphate
  modified_base 17: mod_base = OTHER; note = 2'-O-methyluridine-3'-phosphate
  modified_base 18: mod_base = OTHER; note = 2'-O-methylcytidine-3'-phosphate
  modified_base 19: mod_base = OTHER; note = 2'-O-methyluridine-3'-phosphate
  modified_base 20: mod_base = OTHER; note = 2'-O-methylcytidine-3'-phosphate
  modified_base 21: mod_base = OTHER; note = 2'-O-methyluridine-3'-phosphate ((2S,4R)-1-[29-[[2-(acetylamino)-2-deoxy-beta-D-galactopyra nosyl]oxy]-14,14-bis[[3-[[3-[[5-[[2-(acetylamino)-2-deoxy-b eta-D-galactopyranosyl]oxy]-1-oxopentyl]amino]propyl]amino] -3-oxopropoxy]methyl]-1,12,19,25-tetraoxo-16-oxa-13,20,24-t riazanonacos-1-yl]-4-hydroxy-2-pyrrolidinyl)methyl ester
aggcttcatcatcatgtctct

SEQ ID NO: 1714 - RNA, 21 nt, synthetic construct
  source 1..21: mol_type = other RNA
  modified_base 1: mod_base = OTHER; note = 2'-O-methyluridine-3'-phosphorothioate
  modified_base 2: mod_base = OTHER; note = 2'-O-methylcytidine-3'-phosphorothioate
  modified_base 3: mod_base = OTHER; note = 2'-O-methyladenosine-3'-phosphate
  modified_base 4: mod_base = OTHER; note = 2'-O-methyluridine-3'-phosphate
  modified_base 5: mod_base = OTHER; note = 2'-O-methylcytidine-3'-phosphate
  modified_base 6: mod_base = OTHER; note = 2'-O-methyladenosine-3'-phosphate
  modified_base 7: mod_base = OTHER; note = 2'-deoxy-2'-fluorouridine-3'-phosphate
  modified_base 8: mod_base = OTHER; note = 2'-O-methylcytidine-3'-phosphate
  modified_base 9: mod_base = OTHER; note = 2'-deoxy-2'-fluoroadenosine-3'-phosphate
  modified_base 10: mod_base = OTHER; note = 2'-deoxy-2'-fluorouridine-3'-phosphate
  modified_base 11: mod_base = OTHER; note = 2'-deoxy-2'-fluoroguanosine-3'-phosphate
  modified_base 12: mod_base = OTHER; note = 2'-O-methyluridine-3'-phosphate
  modified_base 13: mod_base = OTHER; note = 2'-O-methylcytidine-3'-phosphate
  modified_base 14: mod_base = OTHER; note = 2'-O-methyluridine-3'-phosphate
  modified_base 15: mod_base = OTHER; note = 2'-O-methylcytidine-3'-phosphate
  modified_base 16: mod_base = OTHER; note = 2'-O-methyluridine-3'-phosphate
  modified_base 17: mod_base = OTHER; note = 2'-O-methylguanosine-3'-phosphate
  modified_base 18: mod_base = OTHER; note = 2'-O-methyladenosine-3'-phosphate
  modified_base 19: mod_base = OTHER; note = 2'-O-methyladenosine-3'-phosphate
  modified_base 20: mod_base = OTHER; note = 2'-O-methylguanosine-3'-phosphate
  modified_base 21: mod_base = OTHER; note = 2'-O-methyluridine-3'-phosphate ((2S,4R)-1-[29-[[2-(acetylamino)-2-deoxy-beta-D-galactopyra nosyl]oxy]-14,14-bis[[3-[[3-[[5-[[2-(acetylamino)-2-deoxy-b eta-D-galactopyranosyl]oxy]-1-oxopentyl]amino]propyl]amino] -3-oxopropoxy]methyl]-1,12,19,25-tetraoxo-16-oxa-13,20,24-t riazanonacos-1-yl]-4-hydroxy-2-pyrrolidinyl)methyl ester
tcatcatcatgtctctgaagt

SEQ ID NO: 1715 - RNA, 21 nt, synthetic construct
  source 1..21: mol_type = other RNA
  modified_base 1: mod_base = OTHER; note = 2'-O-methyladenosine-3'-phosphorothioate
  modified_base 2: mod_base = OTHER; note = 2'-O-methyluridine-3'-phosphorothioate
  modified_base 3: mod_base = OTHER; note = 2'-O-methylcytidine-3'-phosphate
  modified_base 4: mod_base = OTHER; note = 2'-O-methyladenosine-3'-phosphate
  modified_base 5: mod_base = OTHER; note = 2'-O-methyluridine-3'-phosphate
  modified_base 6: mod_base = OTHER; note = 2'-O-methylguanosine-3'-phosphate
  modified_base 7: mod_base = OTHER; note = 2'-deoxy-2'-fluorouridine-3'-phosphate
  modified_base 8: mod_base = OTHER; note = 2'-O-methylcytidine-3'-phosphate
  modified_base 9: mod_base = OTHER; note = 2'-deoxy-2'-fluorouridine-3'-phosphate
  modified_base 10: mod_base = OTHER; note = 2'-deoxy-2'-fluorocytidine-3'-phosphate
  modified_base 11: mod_base = OTHER; note = 2'-deoxy-2'-fluorouridine-3'-phosphate
  modified_base 12: mod_base = OTHER; note = 2'-O-methylguanosine-3'-phosphate
  modified_base 13: mod_base = OTHER; note = 2'-O-methyladenosine-3'-phosphate
  modified_base 14: mod_base = OTHER; note = 2'-O-methyladenosine-3'-phosphate
  modified_base 15: mod_base = OTHER; note = 2'-O-methylguanosine-3'-phosphate
  modified_base 16: mod_base = OTHER; note = 2'-O-methyladenosine-3'-phosphate
  modified_base 17: mod_base = OTHER; note = 2'-O-methylcytidine-3'-phosphate
  modified_base 18: mod_base = OTHER; note = 2'-O-methyladenosine-3'-phosphate
  modified_base 19: mod_base = OTHER; note = 2'-O-methylguanosine-3'-phosphate
  modified_base 20: mod_base = OTHER; note = 2'-O-methyluridine-3'-phosphate
  modified_base 21: mod_base = OTHER; note = 2'-O-methyluridine-3'-phosphate ((2S,4R)-1-[29-[[2-(acetylamino)-2-deoxy-beta-D-galactopyra nosyl]oxy]-14,14-bis[[3-[[3-[[5-[[2-(acetylamino)-2-deoxy-b eta-D-galactopyranosyl]oxy]-1-oxopentyl]amino]propyl]amino] -3-oxopropoxy]methyl]-1,12,19,25-tetraoxo-16-oxa-13,20,24-t riazanonacos-1-yl]-4-hydroxy-2-pyrrolidinyl)methyl ester
atcatgtctctgaagacagtt

SEQ ID NO: 1716 - RNA, 21 nt, synthetic construct
  source 1..21: mol_type = other RNA
  modified_base 1: mod_base = OTHER; note = 2'-O-methyluridine-3'-phosphorothioate
  modified_base 2: mod_base = OTHER; note = 2'-O-methylcytidine-3'-phosphorothioate
  modified_base 3: mod_base = OTHER; note = 2'-O-methyluridine-3'-phosphate
  modified_base 4: mod_base = OTHER; note = 2'-O-methylcytidine-3'-phosphate
  modified_base 5: mod_base = OTHER; note = 2'-O-methyluridine-3'-phosphate
  modified_base 6: mod_base = OTHER; note = 2'-O-methylguanosine-3'-phosphate
  modified_base 7: mod_base = OTHER; note = 2'-deoxy-2'-fluoroadenosine-3'-phosphate
  modified_base 8: mod_base = OTHER; note = 2'-O-methyladenosine-3'-phosphate
  modified_base 9: mod_base = OTHER; note = 2'-deoxy-2'-fluoroguanosine-3'-phosphate
  modified_base 10: mod_base = OTHER; note = 2'-deoxy-2'-fluoroadenosine-3'-phosphate
  modified_base 11: mod_base = OTHER; note = 2'-deoxy-2'-fluorocytidine-3'-phosphate
  modified_base 12: mod_base = OTHER; note = 2'-O-methyladenosine-3'-phosphate
  modified_base 13: mod_base = OTHER; note = 2'-O-methylguanosine-3'-phosphate
  modified_base 14: mod_base = OTHER; note = 2'-O-methyluridine-3'-phosphate
  modified_base 15: mod_base = OTHER; note = 2'-O-methylguanosine-3'-phosphate
  modified_base 16: mod_base = OTHER; note = 2'-O-methylguanosine-3'-phosphate
  modified_base 17: mod_base = OTHER; note = 2'-O-methylcytidine-3'-phosphate
  modified_base 18: mod_base = OTHER; note = 2'-O-methyladenosine-3'-phosphate
  modified_base 19: mod_base = OTHER; note = 2'-O-methylguanosine-3'-phosphate
  modified_base 20: mod_base = OTHER; note = 2'-O-methyluridine-3'-phosphate
  modified_base 21: mod_base = OTHER; note = 2'-O-methyluridine-3'-phosphate ((2S,4R)-1-[29-[[2-(acetylamino)-2-deoxy-beta-D-galactopyra nosyl]oxy]-14,14-bis[[3-[[3-[[5-[[2-(acetylamino)-2-deoxy-b eta-D-galactopyranosyl]oxy]-1-oxopentyl]amino]propyl]amino] -3-oxopropoxy]methyl]-1,12,19,25-tetraoxo-16-oxa-13,20,24-t riazanonacos-1-yl]-4-hydroxy-2-pyrrolidinyl)methyl ester
tctctgaagacagtggcagtt

SEQ ID NO: 1717 - RNA, 21 nt, synthetic construct
  source 1..21: mol_type = other RNA
  modified_base 1: mod_base = OTHER; note = 2'-O-methyladenosine-3'-phosphorothioate
  modified_base 2: mod_base = OTHER; note = 2'-O-methylguanosine-3'-phosphorothioate
  modified_base 3: mod_base = OTHER; note = 2'-O-methyluridine-3'-phosphate
  modified_base 4: mod_base = OTHER; note = 2'-O-methylguanosine-3'-phosphate
  modified_base 5: mod_base = OTHER; note = 2'-O-methylguanosine-3'-phosphate
  modified_base 6: mod_base = OTHER; note = 2'-O-methylcytidine-3'-phosphate
  modified_base 7: mod_base = OTHER; note = 2'-deoxy-2'-fluoroadenosine-3'-phosphate
  modified_base 8: mod_base = OTHER; note = 2'-O-methylguanosine-3'-phosphate
  modified_base 9: mod_base = OTHER; note = 2'-deoxy-2'-fluorouridine-3'-phosphate
  modified_base 10: mod_base = OTHER; note = 2'-deoxy-2'-fluoroguanosine-3'-phosphate
  modified_base 11: mod_base = OTHER; note = 2'-deoxy-2'-fluoroadenosine-3'-phosphate
  modified_base 12: mod_base = OTHER; note = 2'-O-methyluridine-3'-phosphate
  modified_base 13: mod_base = OTHER; note = 2'-O-methylcytidine-3'-phosphate
  modified_base 14: mod_base = OTHER; note = 2'-O-methylguanosine-3'-phosphate
  modified_base 15: mod_base = OTHER; note = 2'-O-methylcytidine-3'-phosphate
  modified_base 16: mod_base = OTHER; note = 2'-O-methylcytidine-3'-phosphate
  modified_base 17: mod_base = OTHER; note = 2'-O-methylcytidine-3'-phosphate
  modified_base 18: mod_base = OTHER; note = 2'-O-methyluridine-3'-phosphate
  modified_base 19: mod_base = OTHER; note = 2'-O-methylguanosine-3'-phosphate
  modified_base 20: mod_base = OTHER; note = 2'-O-methylcytidine-3'-phosphate
  modified_base 21: mod_base = OTHER; note = 2'-O-methyluridine-3'-phosphate ((2S,4R)-1-[29-[[2-(acetylamino)-2-deoxy-beta-D-galactopyra nosyl]oxy]-14,14-bis[[3-[[3-[[5-[[2-(acetylamino)-2-deoxy-b eta-D-galactopyranosyl]oxy]-1-oxopentyl]amino]propyl]amino] -3-oxopropoxy]methyl]-1,12,19,25-tetraoxo-16-oxa-13,20,24-t riazanonacos-1-yl]-4-hydroxy-2-pyrrolidinyl)methyl ester
agtggcagtgatcgccctgct

SEQ ID NO: 1718 - RNA, 21 nt, synthetic construct
  source 1..21: mol_type = other RNA
  modified_base 1: mod_base = OTHER; note = 2'-O-methylcytidine-3'-phosphorothioate
  modified_base 2: mod_base = OTHER; note = 2'-O-methyladenosine-3'-phosphorothioate
  modified_base 3: mod_base = OTHER; note = 2'-O-methylcytidine-3'-phosphate
  modified_base 4: mod_base = OTHER; note = 2'-O-methylcytidine-3'-phosphate
  modified_base 5: mod_base = OTHER; note = 2'-O-methylguanosine-3'-phosphate
  modified_base 6: mod_base = OTHER; note = 2'-O-methylguanosine-3'-phosphate
  modified_base 7: mod_base = OTHER; note = 2'-deoxy-2'-fluorocytidine-3'-phosphate
  modified_base 8: mod_base = OTHER; note = 2'-O-methyluridine-3'-phosphate
  modified_base 9: mod_base = OTHER; note = 2'-deoxy-2'-fluorocytidine-3'-phosphate
  modified_base 10: mod_base = OTHER; note = 2'-deoxy-2'-fluorocytidine-3'-phosphate
  modified_base 11: mod_base = OTHER; note = 2'-deoxy-2'-fluoroguanosine-3'-phosphate
  modified_base 12: mod_base = OTHER; note = 2'-O-methylguanosine-3'-phosphate
  modified_base 13: mod_base = OTHER; note = 2'-O-methyladenosine-3'-phosphate
  modified_base 14: mod_base = OTHER; note = 2'-O-methyluridine-3'-phosphate
  modified_base 15: mod_base = OTHER; note = 2'-O-methylguanosine-3'-phosphate
  modified_base 16: mod_base = OTHER; note = 2'-O-methylguanosine-3'-phosphate
  modified_base 17: mod_base = OTHER; note = 2'-O-methyluridine-3'-phosphate
  modified_base 18: mod_base = OTHER; note = 2'-O-methylguanosine-3'-phosphate
  modified_base 19: mod_base = OTHER; note = 2'-O-methyluridine-3'-phosphate
  modified_base 20: mod_base = OTHER; note = 2'-O-methyluridine-3'-phosphate
  modified_base 21: mod_base = OTHER; note = 2'-O-methyluridine-3'-phosphate ((2S,4R)-1-[29-[[2-(acetylamino)-2-deoxy-beta-D-galactopyra nosyl]oxy]-14,14-bis[[3-[[3-[[5-[[2-(acetylamino)-2-deoxy-b eta-D-galactopyranosyl]oxy]-1-oxopentyl]amino]propyl]amino] -3-oxopropoxy]methyl]-1,12,19,25-tetraoxo-16-oxa-13,20,24-t riazanonacos-1-yl]-4-hydroxy-2-pyrrolidinyl)methyl ester
caccggctccggatggtgttt

SEQ ID NO: 1719 - RNA, 21 nt, synthetic construct
  source 1..21: mol_type = other RNA
  modified_base 1: mod_base = OTHER; note = 2'-O-methyladenosine-3'-phosphorothioate
  modified_base 2: mod_base = OTHER; note = 2'-O-methylcytidine-3'-phosphorothioate
  modified_base 3: mod_base = OTHER; note = 2'-O-methyladenosine-3'-phosphate
  modified_base 4: mod_base = OTHER; note = 2'-O-methylguanosine-3'-phosphate
  modified_base 5: mod_base = OTHER; note = 2'-O-methylcytidine-3'-phosphate
  modified_base 6: mod_base = OTHER; note = 2'-O-methylcytidine-3'-phosphate
  modified_base 7: mod_base = OTHER; note = 2'-deoxy-2'-fluorouridine-3'-phosphate
  modified_base 8: mod_base = OTHER; note = 2'-O-methyladenosine-3'-phosphate
  modified_base 9: mod_base = OTHER; note = 2'-deoxy-2'-fluoroadenosine-3'-phosphate
  modified_base 10: mod_base = OTHER; note = 2'-deoxy-2'-fluorouridine-3'-phosphate
  modified_base 11: mod_base = OTHER; note = 2'-deoxy-2'-fluorocytidine-3'-phosphate
  modified_base 12: mod_base = OTHER; note = 2'-O-methylguanosine-3'-phosphate
  modified_base 13: mod_base = OTHER; note = 2'-O-methylcytidine-3'-phosphate
  modified_base 14: mod_base = OTHER; note = 2'-O-methyladenosine-3'-phosphate
  modified_base 15: mod_base = OTHER; note = 2'-O-methylcytidine-3'-phosphate
  modified_base 16: mod_base = OTHER; note = 2'-O-methylguanosine-3'-phosphate
  modified_base 17: mod_base = OTHER; note = 2'-O-methylguanosine-3'-phosphate
  modified_base 18: mod_base = OTHER; note = 2'-O-methylcytidine-3'-phosphate
  modified_base 19: mod_base = OTHER; note = 2'-O-methylcytidine-3'-phosphate
  modified_base 20: mod_base = OTHER; note = 2'-O-methyluridine-3'-phosphate
  modified_base 21: mod_base = OTHER; note = 2'-O-methyluridine-3'-phosphate ((2S,4R)-1-[29-[[2-(acetylamino)-2-deoxy-beta-D-galactopyra nosyl]oxy]-14,14-bis[[3-[[3-[[5-[[2-(acetylamino)-2-deoxy-b eta-D-galactopyranosyl]oxy]-1-oxopentyl]amino]propyl]amino] -3-oxopropoxy]methyl]-1,12,19,25-tetraoxo-16-oxa-13,20,24-t riazanonacos-1-yl]-4-hydroxy-2-pyrrolidinyl)methyl ester
acagcctaatcgcacggcctt

SEQ ID NO: 1720 - RNA, 21 nt, synthetic construct
  source 1..21: mol_type = other RNA
  modified_base 1: mod_base = OTHER; note = 2'-O-methylcytidine-3'-phosphorothioate
  modified_base 2: mod_base = OTHER; note = 2'-O-methyluridine-3'-phosphorothioate
  modified_base 3: mod_base = OTHER; note = 2'-O-methyladenosine-3'-phosphate
  modified_base 4: mod_base = OTHER; note = 2'-O-methyladenosine-3'-phosphate
  modified_base 5: mod_base = OTHER; note = 2'-O-methyluridine-3'-phosphate
  modified_base 6: mod_base = OTHER; note = 2'-O-methylcytidine-3'-phosphate
  modified_base 7: mod_base = OTHER; note = 2'-deoxy-2'-fluoroguanosine-3'-phosphate
  modified_base 8: mod_base = OTHER; note = 2'-O-methylcytidine-3'-phosphate
  modified_base 9: mod_base = OTHER; note = 2'-deoxy-2'-fluoroadenosine-3'-phosphate
  modified_base 10: mod_base = OTHER; note = 2'-deoxy-2'-fluorocytidine-3'-phosphate
  modified_base 11: mod_base = OTHER; note = 2'-deoxy-2'-fluoroguanosine-3'-phosphate
  modified_base 12: mod_base = OTHER; note = 2'-O-methylguanosine-3'-phosphate
  modified_base 13: mod_base = OTHER; note = 2'-O-methylcytidine-3'-phosphate
  modified_base 14: mod_base = OTHER; note = 2'-O-methylcytidine-3'-phosphate
  modified_base 15: mod_base = OTHER; note = 2'-O-methyluridine-3'-phosphate
  modified_base 16: mod_base = OTHER; note = 2'-O-methylcytidine-3'-phosphate
  modified_base 17: mod_base = OTHER; note = 2'-O-methylcytidine-3'-phosphate
  modified_base 18: mod_base = OTHER; note = 2'-O-methyluridine-3'-phosphate
  modified_base 19: mod_base = OTHER; note = 2'-O-methyluridine-3'-phosphate
  modified_base 20: mod_base = OTHER; note = 2'-O-methyluridine-3'-phosphate
  modified_base 21: mod_base = OTHER; note = 2'-O-methyluridine-3'-phosphate ((2S,4R)-1-[29-[[2-(acetylamino)-2-deoxy-beta-D-galactopyra nosyl]oxy]-14,14-bis[[3-[[3-[[5-[[2-(acetylamino)-2-deoxy-b eta-D-galactopyranosyl]oxy]-1-oxopentyl]amino]propyl]amino] -3-oxopropoxy]methyl]-1,12,19,25-tetraoxo-16-oxa-13,20,24-t riazanonacos-1-yl]-4-hydroxy-2-pyrrolidinyl)methyl ester
ctaatcgcacggcctcctttt

SEQ ID NO: 1721 - RNA, 21 nt, synthetic construct
  source 1..21: mol_type = other RNA
  modified_base 1: mod_base = OTHER; note = 2'-O-methylcytidine-3'-phosphorothioate
  modified_base 2: mod_base = OTHER; note = 2'-O-methylguanosine-3'-phosphorothioate
  modified_base 3: mod_base = OTHER; note = 2'-O-methylcytidine-3'-phosphate
  modified_base 4: mod_base = OTHER; note = 2'-O-methyladenosine-3'-phosphate
  modified_base 5: mod_base = OTHER; note = 2'-O-methylcytidine-3'-phosphate
  modified_base 6: mod_base = OTHER; note = 2'-O-methylguanosine-3'-phosphate
  modified_base 7: mod_base = OTHER; note = 2'-deoxy-2'-fluoroguanosine-3'-phosphate
  modified_base 8: mod_base = OTHER; note = 2'-O-methylcytidine-3'-phosphate
  modified_base 9: mod_base = OTHER; note = 2'-deoxy-2'-fluorocytidine-3'-phosphate
  modified_base 10: mod_base = OTHER; note = 2'-deoxy-2'-fluorouridine-3'-phosphate
  modified_base 11: mod_base = OTHER; note = 2'-deoxy-2'-fluorocytidine-3'-phosphate
  modified_base 12: mod_base = OTHER; note = 2'-O-methylcytidine-3'-phosphate
  modified_base 13: mod_base = OTHER; note = 2'-O-methyluridine-3'-phosphate
  modified_base 14: mod_base = OTHER; note = 2'-O-methyluridine-3'-phosphate
  modified_base 15: mod_base = OTHER; note = 2'-O-methyluridine-3'-phosphate
  modified_base 16: mod_base = OTHER; note = 2'-O-methylcytidine-3'-phosphate
  modified_base 17: mod_base = OTHER; note = 2'-O-methylcytidine-3'-phosphate
  modified_base 18: mod_base = OTHER; note = 2'-O-methylcytidine-3'-phosphate
  modified_base 19: mod_base = OTHER; note = 2'-O-methyluridine-3'-phosphate
  modified_base 20: mod_base = OTHER; note = 2'-O-methylguanosine-3'-phosphate
  modified_base 21: mod_base = OTHER; note = 2'-O-methyluridine-3'-phosphate ((2S,4R)-1-[29-[[2-(acetylamino)-2-deoxy-beta-D-galactopyra nosyl]oxy]-14,14-bis[[3-[[3-[[5-[[2-(acetylamino)-2-deoxy-b eta-D-galactopyranosyl]oxy]-1-oxopentyl]amino]propyl]amino] -3-oxopropoxy]methyl]-1,12,19,25-tetraoxo-16-oxa-13,20,24-t riazanonacos-1-yl]-4-hydroxy-2-pyrrolidinyl)methyl ester
cgcacggcctcctttccctgt

SEQ ID NO: 1722 - RNA, 21 nt, synthetic construct
  source 1..21: mol_type = other RNA
  modified_base 1: mod_base = OTHER; note = 2'-O-methylcytidine-3'-phosphorothioate
  modified_base 2: mod_base = OTHER; note = 2'-O-methylcytidine-3'-phosphorothioate
  modified_base 3: mod_base = OTHER; note = 2'-O-methyluridine-3'-phosphate
  modified_base 4: mod_base = OTHER; note = 2'-O-methylcytidine-3'-phosphate
  modified_base 5: mod_base = OTHER; note = 2'-O-methylcytidine-3'-phosphate
  modified_base 6: mod_base = OTHER; note = 2'-O-methyluridine-3'-phosphate
  modified_base 7: mod_base = OTHER; note = 2'-deoxy-2'-fluorouridine-3'-phosphate
  modified_base 8: mod_base = OTHER; note = 2'-O-methyluridine-3'-phosphate
  modified_base 9: mod_base = OTHER; note = 2'-deoxy-2'-fluorocytidine-3'-phosphate
  modified_base 10: mod_base = OTHER; note = 2'-deoxy-2'-fluorocytidine-3'-phosphate
  modified_base 11: mod_base = OTHER; note = 2'-deoxy-2'-fluorocytidine-3'-phosphate
  modified_base 12: mod_base = OTHER; note = 2'-O-methyluridine-3'-phosphate
  modified_base 13: mod_base = OTHER; note = 2'-O-methylguanosine-3'-phosphate
  modified_base 14: mod_base = OTHER; note = 2'-O-methylcytidine-3'-phosphate
  modified_base 15: mod_base = OTHER; note = 2'-O-methyladenosine-3'-phosphate
  modified_base 16: mod_base = OTHER; note = 2'-O-methylcytidine-3'-phosphate
  modified_base 17: mod_base = OTHER; note = 2'-O-methylcytidine-3'-phosphate
  modified_base 18: mod_base = OTHER; note = 2'-O-methylguanosine-3'-phosphate
  modified_base 19: mod_base = OTHER; note = 2'-O-methyluridine-3'-phosphate
  modified_base 20: mod_base = OTHER; note = 2'-O-methyladenosine-3'-phosphate
  modified_base 21: mod_base = OTHER; note = 2'-O-methyluridine-3'-phosphate ((2S,4R)-1-[29-[[2-(acetylamino)-2-deoxy-beta-D-galactopyra nosyl]oxy]-14,14-bis[[3-[[3-[[5-[[2-(acetylamino)-2-deoxy-b eta-D-galactopyranosyl]oxy]-1-oxopentyl]amino]propyl]amino] -3-oxopropoxy]methyl]-1,12,19,25-tetraoxo-16-oxa-13,20,24-t riazanonacos-1-yl]-4-hydroxy-2-pyrrolidinyl)methyl ester
cctcctttccctgcaccgtat

SEQ ID NO: 1723 - RNA, 21 nt, synthetic construct
  source 1..21: mol_type = other RNA
  modified_base 1: mod_base = OTHER; note = 2'-O-methyluridine-3'-phosphorothioate
  modified_base 2: mod_base = OTHER; note = 2'-O-methyluridine-3'-phosphorothioate
  modified_base 3: mod_base = OTHER; note = 2'-O-methyluridine-3'-phosphate
  modified_base 4: mod_base = OTHER; note = 2'-O-methylcytidine-3'-phosphate
  modified_base 5: mod_base = OTHER; note = 2'-O-methylcytidine-3'-phosphate
  modified_base 6: mod_base = OTHER; note = 2'-O-methylcytidine-3'-phosphate
  modified_base 7: mod_base = OTHER; note = 2'-deoxy-2'-fluorouridine-3'-phosphate
  modified_base 8: mod_base = OTHER; note = 2'-O-methylguanosine-3'-phosphate
  modified_base 9: mod_base = OTHER; note = 2'-deoxy-2'-fluorocytidine-3'-phosphate
  modified_base 10: mod_base = OTHER; note = 2'-deoxy-2'-fluoroadenosine-3'-phosphate
  modified_base 11: mod_base = OTHER; note = 2'-deoxy-2'-fluorocytidine-3'-phosphate
  modified_base 12: mod_base = OTHER; note = 2'-O-methylcytidine-3'-phosphate
  modified_base 13: mod_base = OTHER; note = 2'-O-methylguanosine-3'-phosphate
  modified_base 14: mod_base = OTHER; note = 2'-O-methyluridine-3'-phosphate
  modified_base 15: mod_base = OTHER; note = 2'-O-methyladenosine-3'-phosphate
  modified_base 16: mod_base = OTHER; note = 2'-O-methylcytidine-3'-phosphate
  modified_base 17: mod_base = OTHER; note = 2'-O-methyluridine-3'-phosphate
  modified_base 18: mod_base = OTHER; note = 2'-O-methylcytidine-3'-phosphate
  modified_base 19: mod_base = OTHER; note = 2'-O-methylcytidine-3'-phosphate
  modified_base 20: mod_base = OTHER; note = 2'-O-methyluridine-3'-phosphate
  modified_base 21: mod_base = OTHER; note = 2'-O-methyluridine-3'-phosphate ((2S,4R)-1-[29-[[2-(acetylamino)-2-deoxy-beta-D-galactopyra nosyl]oxy]-14,14-bis[[3-[[3-[[5-[[2-(acetylamino)-2-deoxy-b eta-D-galactopyranosyl]oxy]-1-oxopentyl]amino]propyl]amino] -3-oxopropoxy]methyl]-1,12,19,25-tetraoxo-16-oxa-13,20,24-t riazanonacos-1-yl]-4-hydroxy-2-pyrrolidinyl)methyl ester
tttccctgcaccgtactcctt

SEQ ID NO: 1724 - RNA, 21 nt, synthetic construct
  source 1..21: mol_type = other RNA
  modified_base 1: mod_base = OTHER; note = 2'-O-methyluridine-3'-phosphorothioate
  modified_base 2: mod_base = OTHER; note = 2'-O-methylguanosine-3'-phosphorothioate
  modified_base 3: mod_base = OTHER; note = 2'-O-methylcytidine-3'-phosphate
  modified_base 4: mod_base = OTHER; note = 2'-O-methyladenosine-3'-phosphate
  modified_base 5: mod_base = OTHER; note = 2'-O-methylcytidine-3'-phosphate
  modified_base 6: mod_base = OTHER; note = 2'-O-methylcytidine-3'-phosphate
  modified_base 7: mod_base = OTHER; note = 2'-deoxy-2'-fluoroguanosine-3'-phosphate
  modified_base 8: mod_base = OTHER; note = 2'-O-methyluridine-3'-phosphate
  modified_base 9: mod_base = OTHER; note = 2'-deoxy-2'-fluoroadenosine-3'-phosphate
  modified_base 10: mod_base = OTHER; note = 2'-deoxy-2'-fluorocytidine-3'-phosphate
  modified_base 11: mod_base = OTHER; note = 2'-deoxy-2'-fluorouridine-3'-phosphate
  modified_base 12: mod_base = OTHER; note = 2'-O-methylcytidine-3'-phosphate
  modified_base 13: mod_base = OTHER; note = 2'-O-methylcytidine-3'-phosphate
  modified_base 14: mod_base = OTHER; note = 2'-O-methyluridine-3'-phosphate
  modified_base 15: mod_base = OTHER; note = 2'-O-methylcytidine-3'-phosphate
  modified_base 16: mod_base = OTHER; note = 2'-O-methyladenosine-3'-phosphate
  modified_base 17: mod_base = OTHER; note = 2'-O-methylcytidine-3'-phosphate
  modified_base 18: mod_base = OTHER; note = 2'-O-methylcytidine-3'-phosphate
  modified_base 19: mod_base = OTHER; note = 2'-O-methylcytidine-3'-phosphate
  modified_base 20: mod_base = OTHER; note = 2'-O-methyluridine-3'-phosphate
  modified_base 21: mod_base = OTHER; note = 2'-O-methyluridine-3'-phosphate ((2S,4R)-1-[29-[[2-(acetylamino)-2-deoxy-beta-D-galactopyra nosyl]oxy]-14,14-bis[[3-[[3-[[5-[[2-(acetylamino)-2-deoxy-b eta-D-galactopyranosyl]oxy]-1-oxopentyl]amino]propyl]amino] -3-oxopropoxy]methyl]-1,12,19,25-tetraoxo-16-oxa-13,20,24-t riazanonacos-1-yl]-4-hydroxy-2-pyrrolidinyl)methyl ester
tgcaccgtactcctcaccctt

SEQ ID NO: 1725 - RNA, 21 nt, synthetic construct
  source 1..21: mol_type = other RNA
  modified_base 1: mod_base = OTHER; note = 2'-O-methyladenosine-3'-phosphorothioate
  modified_base 2: mod_base = OTHER; note = 2'-O-methylcytidine-3'-phosphorothioate
  modified_base 3: mod_base = OTHER; note = 2'-O-methyluridine-3'-phosphate
  modified_base 4: mod_base = OTHER; note = 2'-O-methylcytidine-3'-phosphate
  modified_base 5: mod_base = OTHER; note = 2'-O-methylcytidine-3'-phosphate
  modified_base 6: mod_base = OTHER; note = 2'-O-methyluridine-3'-phosphate
  modified_base 7: mod_base = OTHER; note = 2'-deoxy-2'-fluorocytidine-3'-phosphate
  modified_base 8: mod_base = OTHER; note = 2'-O-methyladenosine-3'-phosphate
  modified_base 9: mod_base = OTHER; note = 2'-deoxy-2'-fluorocytidine-3'-phosphate
  modified_base 10: mod_base = OTHER; note = 2'-deoxy-2'-fluorocytidine-3'-phosphate
  modified_base 11: mod_base = OTHER; note = 2'-deoxy-2'-fluorocytidine-3'-phosphate
  modified_base 12: mod_base = OTHER; note = 2'-O-methyluridine-3'-phosphate
  modified_base 13: mod_base = OTHER; note = 2'-O-methylguanosine-3'-phosphate
  modified_base 14: mod_base = OTHER; note = 2'-O-methylcytidine-3'-phosphate
  modified_base 15: mod_base = OTHER; note = 2'-O-methyluridine-3'-phosphate
  modified_base 16: mod_base = OTHER; note = 2'-O-methyluridine-3'-phosphate
  modified_base 17: mod_base = OTHER; note = 2'-O-methylcytidine-3'-phosphate
  modified_base 18: mod_base = OTHER; note = 2'-O-methyluridine-3'-phosphate
  modified_base 19: mod_base = OTHER; note = 2'-O-methylcytidine-3'-phosphate
  modified_base 20: mod_base = OTHER; note = 2'-O-methyluridine-3'-phosphate
  modified_base 21: mod_base = OTHER; note = 2'-O-methyluridine-3'-phosphate ((2S,4R)-1-[29-[[2-(acetylamino)-2-deoxy-beta-D-galactopyra nosyl]oxy]-14,14-bis[[3-[[3-[[5-[[2-(acetylamino)-2-deoxy-b eta-D-galactopyranosyl]oxy]-1-oxopentyl]amino]propyl]amino] -3-oxopropoxy]methyl]-1,12,19,25-tetraoxo-16-oxa-13,20,24-t riazanonacos-1-yl]-4-hydroxy-2-pyrrolidinyl)methyl ester
actcctcaccctgcttctctt

SEQ ID NO: 1726 - RNA, 21 nt, synthetic construct
  source 1..21: mol_type = other RNA
  modified_base 1: mod_base = OTHER; note = 2'-O-methyladenosine-3'-phosphorothioate
  modified_base 2: mod_base = OTHER; note = 2'-O-methylcytidine-3'-phosphorothioate
  modified_base 3: mod_base = OTHER; note = 2'-O-methylcytidine-3'-phosphate
  modified_base 4: mod_base = OTHER; note = 2'-O-methylcytidine-3'-phosphate
  modified_base 5: mod_base = OTHER; note = 2'-O-methyluridine-3'-phosphate
  modified_base 6: mod_base = OTHER; note = 2'-O-methylguanosine-3'-phosphate
  modified_base 7: mod_base = OTHER; note = 2'-deoxy-2'-fluorocytidine-3'-phosphate
  modified_base 8: mod_base = OTHER; note = 2'-O-methyluridine-3'-phosphate
  modified_base 9: mod_base = OTHER; note = 2'-deoxy-2'-fluorouridine-3'-phosphate
  modified_base 10: mod_base = OTHER; note = 2'-deoxy-2'-fluorocytidine-3'-phosphate
  modified_base 11: mod_base = OTHER; note = 2'-deoxy-2'-fluorouridine-3'-phosphate
  modified_base 12: mod_base = OTHER; note = 2'-O-methylcytidine-3'-phosphate
  modified_base 13: mod_base = OTHER; note = 2'-O-methyluridine-3'-phosphate
  modified_base 14: mod_base = OTHER; note = 2'-O-methylguanosine-3'-phosphate
  modified_base 15: mod_base = OTHER; note = 2'-O-methylguanosine-3'-phosphate
  modified_base 16: mod_base = OTHER; note = 2'-O-methylguanosine-3'-phosphate
  modified_base 17: mod_base = OTHER; note = 2'-O-methylcytidine-3'-phosphate
  modified_base 18: mod_base = OTHER; note = 2'-O-methylcytidine-3'-phosphate
  modified_base 19: mod_base = OTHER; note = 2'-O-methyladenosine-3'-phosphate
  modified_base 20: mod_base = OTHER; note = 2'-O-methylcytidine-3'-phosphate
  modified_base 21: mod_base = OTHER; note = 2'-O-methyluridine-3'-phosphate ((2S,4R)-1-[29-[[2-(acetylamino)-2-deoxy-beta-D-galactopyra nosyl]oxy]-14,14-bis[[3-[[3-[[5-[[2-(acetylamino)-2-deoxy-b eta-D-galactopyranosyl]oxy]-1-oxopentyl]amino]propyl]amino] -3-oxopropoxy]methyl]-1,12,19,25-tetraoxo-16-oxa-13,20,24-t riazanonacos-1-yl]-4-hydroxy-2-pyrrolidinyl)methyl ester
accctgcttctctgggccact

SEQ ID NO: 1727 - RNA, 21 nt, synthetic construct
  source 1..21: mol_type = other RNA
  modified_base 1: mod_base = OTHER; note = 2'-O-methylcytidine-3'-phosphorothioate
  modified_base 2: mod_base = OTHER; note = 2'-O-methyluridine-3'-phosphorothioate
  modified_base 3: mod_base = OTHER; note = 2'-O-methyluridine-3'-phosphate
  modified_base 4: mod_base = OTHER; note = 2'-O-methylcytidine-3'-phosphate
  modified_base 5: mod_base = OTHER; note = 2'-O-methyluridine-3'-phosphate
  modified_base 6: mod_base = OTHER; note = 2'-O-methylcytidine-3'-phosphate
  modified_base 7: mod_base = OTHER; note = 2'-deoxy-2'-fluorouridine-3'-phosphate
  modified_base 8: mod_base = OTHER; note = 2'-O-methylguanosine-3'-phosphate
  modified_base 9: mod_base = OTHER; note = 2'-deoxy-2'-fluoroguanosine-3'-phosphate
  modified_base 10: mod_base = OTHER; note = 2'-deoxy-2'-fluoroguanosine-3'-phosphate
  modified_base 11: mod_base = OTHER; note = 2'-deoxy-2'-fluorocytidine-3'-phosphate
  modified_base 12: mod_base = OTHER; note = 2'-O-methylcytidine-3'-phosphate
  modified_base 13: mod_base = OTHER; note = 2'-O-methyladenosine-3'-phosphate
  modified_base 14: mod_base = OTHER; note = 2'-O-methylcytidine-3'-phosphate
  modified_base 15: mod_base = OTHER; note = 2'-O-methylcytidine-3'-phosphate
  modified_base 16: mod_base = OTHER; note = 2'-O-methyladenosine-3'-phosphate
  modified_base 17: mod_base = OTHER; note = 2'-O-methylguanosine-3'-phosphate
  modified_base 18: mod_base = OTHER; note = 2'-O-methyluridine-3'-phosphate
  modified_base 19: mod_base = OTHER; note = 2'-O-methyluridine-3'-phosphate
  modified_base 20: mod_base = OTHER; note = 2'-O-methyluridine-3'-phosphate
  modified_base 21: mod_base = OTHER; note = 2'-O-methyluridine-3'-phosphate ((2S,4R)-1-[29-[[2-(acetylamino)-2-deoxy-beta-D-galactopyra nosyl]oxy]-14,14-bis[[3-[[3-[[5-[[2-(acetylamino)-2-deoxy-b eta-D-galactopyranosyl]oxy]-1-oxopentyl]amino]propyl]amino] -3-oxopropoxy]methyl]-1,12,19,25-tetraoxo-16-oxa-13,20,24-t riazanonacos-1-yl]-4-hydroxy-2-pyrrolidinyl)methyl ester
cttctctgggccaccagtttt

SEQ ID NO: 1728 - RNA, 21 nt, synthetic construct
  source 1..21: mol_type = other RNA
  modified_base 1: mod_base = OTHER; note = 2'-O-methylcytidine-3'-phosphorothioate
  modified_base 2: mod_base = OTHER; note = 2'-O-methyluridine-3'-phosphorothioate
  modified_base 3: mod_base = OTHER; note = 2'-O-methylguanosine-3'-phosphate
  modified_base 4: mod_base = OTHER; note = 2'-O-methylguanosine-3'-phosphate
  modified_base 5: mod_base = OTHER; note = 2'-O-methylguanosine-3'-phosphate
  modified_base 6: mod_base = OTHER; note = 2'-O-methylcytidine-3'-phosphate
  modified_base 7: mod_base = OTHER; note = 2'-deoxy-2'-fluorocytidine-3'-phosphate
  modified_base 8: mod_base = OTHER; note = 2'-O-methyladenosine-3'-phosphate
  modified_base 9: mod_base = OTHER; note = 2'-deoxy-2'-fluorocytidine-3'-phosphate
  modified_base 10: mod_base = OTHER; note = 2'-deoxy-2'-fluorocytidine-3'-phosphate
  modified_base 11: mod_base = OTHER; note = 2'-deoxy-2'-fluoroadenosine-3'-phosphate
  modified_base 12: mod_base = OTHER; note = 2'-O-methylguanosine-3'-phosphate
  modified_base 13: mod_base = OTHER; note = 2'-O-methyluridine-3'-phosphate
  modified_base 14: mod_base = OTHER; note = 2'-O-methyluridine-3'-phosphate
  modified_base 15: mod_base = OTHER; note = 2'-O-methyluridine-3'-phosphate
  modified_base 16: mod_base = OTHER; note = 2'-O-methylcytidine-3'-phosphate
  modified_base 17: mod_base = OTHER; note = 2'-O-methyladenosine-3'-phosphate
  modified_base 18: mod_base = OTHER; note = 2'-O-methylcytidine-3'-phosphate
  modified_base 19: mod_base = OTHER; note = 2'-O-methylcytidine-3'-phosphate
  modified_base 20: mod_base = OTHER; note = 2'-O-methylcytidine-3'-phosphate
  modified_base 21: mod_base = OTHER; note = 2'-O-methyluridine-3'-phosphate ((2S,4R)-1-[29-[[2-(acetylamino)-2-deoxy-beta-D-galactopyra nosyl]oxy]-14,14-bis[[3-[[3-[[5-[[2-(acetylamino)-2-deoxy-b eta-D-galactopyranosyl]oxy]-1-oxopentyl]amino]propyl]amino] -3-oxopropoxy]methyl]-1,12,19,25-tetraoxo-16-oxa-13,20,24-t riazanonacos-1-yl]-4-hydroxy-2-pyrrolidinyl)methyl ester
ctgggccaccagtttcaccct

SEQ ID NO: 1729 - RNA, 21 nt, synthetic construct
  source 1..21: mol_type = other RNA
  modified_base 1: mod_base = OTHER; note = 2'-O-methylcytidine-3'-phosphorothioate
  modified_base 2: mod_base = OTHER; note = 2'-O-methyladenosine-3'-phosphorothioate
  modified_base 3: mod_base = OTHER; note = 2'-O-methylcytidine-3'-phosphate
  modified_base 4: mod_base = OTHER; note = 2'-O-methylcytidine-3'-phosphate
  modified_base 5: mod_base = OTHER; note = 2'-O-methyladenosine-3'-phosphate
  modified_base 6: mod_base = OTHER; note = 2'-O-methylguanosine-3'-phosphate
  modified_base 7: mod_base = OTHER; note = 2'-deoxy-2'-fluorouridine-3'-phosphate
  modified_base 8: mod_base = OTHER; note = 2'-O-methyluridine-3'-phosphate
  modified_base 9: mod_base = OTHER; note = 2'-deoxy-2'-fluorouridine-3'-phosphate
  modified_base 10: mod_base = OTHER; note = 2'-deoxy-2'-fluorocytidine-3'-phosphate
  modified_base 11: mod_base = OTHER; note = 2'-deoxy-2'-fluoroadenosine-3'-phosphate
  modified_base 12: mod_base = OTHER; note = 2'-O-methylcytidine-3'-phosphate
  modified_base 13: mod_base = OTHER; note = 2'-O-methylcytidine-3'-phosphate
  modified_base 14: mod_base = OTHER; note = 2'-O-methylcytidine-3'-phosphate
  modified_base 15: mod_base = OTHER; note = 2'-O-methyluridine-3'-phosphate
  modified_base 16: mod_base = OTHER; note = 2'-O-methyluridine-3'-phosphate
  modified_base 17: mod_base = OTHER; note = 2'-O-methylguanosine-3'-phosphate
  modified_base 18: mod_base = OTHER; note = 2'-O-methylcytidine-3'-phosphate
  modified_base 19: mod_base = OTHER; note = 2'-O-methylcytidine-3'-phosphate
  modified_base 20: mod_base = OTHER; note = 2'-O-methyladenosine-3'-phosphate
  modified_base 21: mod_base = OTHER; note = 2'-O-methyluridine-3'-phosphate ((2S,4R)-1-[29-[[2-(acetylamino)-2-deoxy-beta-D-galactopyra nosyl]oxy]-14,14-bis[[3-[[3-[[5-[[2-(acetylamino)-2-deoxy-b eta-D-galactopyranosyl]oxy]-1-oxopentyl]amino]propyl]amino] -3-oxopropoxy]methyl]-1,12,19,25-tetraoxo-16-oxa-13,20,24-t riazanonacos-1-yl]-4-hydroxy-2-pyrrolidinyl)methyl ester
caccagtttcacccttgccat

SEQ ID NO: 1730 - RNA, 21 nt, synthetic construct
  source 1..21: mol_type = other RNA
  modified_base 1: mod_base = OTHER; note = 2'-O-methyluridine-3'-phosphorothioate
  modified_base 2: mod_base = OTHER; note = 2'-O-methylcytidine-3'-phosphorothioate
  modified_base 3: mod_base = OTHER; note = 2'-O-methyladenosine-3'-phosphate
  modified_base 4: mod_base = OTHER; note = 2'-O-methylcytidine-3'-phosphate
  modified_base 5: mod_base = OTHER; note = 2'-O-methylcytidine-3'-phosphate
  modified_base 6: mod_base = OTHER; note = 2'-O-methylcytidine-3'-phosphate
  modified_base 7: mod_base = OTHER; note = 2'-deoxy-2'-fluorouridine-3'-phosphate
  modified_base 8: mod_base = OTHER; note = 2'-O-methyluridine-3'-phosphate
  modified_base 9: mod_base = OTHER; note = 2'-deoxy-2'-fluoroguanosine-3'-phosphate
  modified_base 10: mod_base = OTHER; note = 2'-deoxy-2'-fluorocytidine-3'-phosphate
  modified_base 11: mod_base = OTHER; note = 2'-deoxy-2'-fluorocytidine-3'-phosphate
  modified_base 12: mod_base = OTHER; note = 2'-O-methyladenosine-3'-phosphate
  modified_base 13: mod_base = OTHER; note = 2'-O-methylcytidine-3'-phosphate
  modified_base 14: mod_base = OTHER; note = 2'-O-methylcytidine-3'-phosphate
  modified_base 15: mod_base = OTHER; note = 2'-O-methyluridine-3'-phosphate
  modified_base 16: mod_base = OTHER; note = 2'-O-methyluridine-3'-phosphate
  modified_base 17: mod_base = OTHER; note = 2'-O-methylguanosine-3'-phosphate
  modified_base 18: mod_base = OTHER; note = 2'-O-methylguanosine-3'-phosphate
  modified_base 19: mod_base = OTHER; note = 2'-O-methylcytidine-3'-phosphate
  modified_base 20: mod_base = OTHER; note = 2'-O-methyluridine-3'-phosphate
  modified_base 21: mod_base = OTHER; note = 2'-O-methyluridine-3'-phosphate ((2S,4R)-1-[29-[[2-(acetylamino)-2-deoxy-beta-D-galactopyra nosyl]oxy]-14,14-bis[[3-[[3-[[5-[[2-(acetylamino)-2-deoxy-b eta-D-galactopyranosyl]oxy]-1-oxopentyl]amino]propyl]amino] -3-oxopropoxy]methyl]-1,12,19,25-tetraoxo-16-oxa-13,20,24-t riazanonacos-1-yl]-4-hydroxy-2-pyrrolidinyl)methyl ester
tcacccttgccaccttggctt

SEQ ID NO: 1731 - RNA, 21 nt, synthetic construct
  source 1..21: mol_type = other RNA
  modified_base 1: mod_base = OTHER; note = 2'-O-methylguanosine-3'-phosphorothioate
  modified_base 2: mod_base = OTHER; note = 2'-O-methylcytidine-3'-phosphorothioate
  modified_base 3: mod_base = OTHER; note = 2'-O-methylcytidine-3'-phosphate
  modified_base 4: mod_base = OTHER; note = 2'-O-methyladenosine-3'-phosphate
  modified_base 5: mod_base = OTHER; note = 2'-O-methylcytidine-3'-phosphate
  modified_base 6: mod_base = OTHER; note = 2'-O-methylcytidine-3'-phosphate
  modified_base 7: mod_base = OTHER; note = 2'-deoxy-2'-fluorouridine-3'-phosphate
  modified_base 8: mod_base = OTHER; note = 2'-O-methyluridine-3'-phosphate
  modified_base 9: mod_base = OTHER; note = 2'-deoxy-2'-fluoroguanosine-3'-phosphate
  modified_base 10: mod_base = OTHER; note = 2'-deoxy-2'-fluoroguanosine-3'-phosphate
  modified_base 11: mod_base = OTHER; note = 2'-deoxy-2'-fluorocytidine-3'-phosphate
  modified_base 12: mod_base = OTHER; note = 2'-O-methyluridine-3'-phosphate
  modified_base 13: mod_base = OTHER; note = 2'-O-methyladenosine-3'-phosphate
  modified_base 14: mod_base = OTHER; note = 2'-O-methylcytidine-3'-phosphate
  modified_base 15: mod_base = OTHER; note = 2'-O-methylcytidine-3'-phosphate
  modified_base 16: mod_base = OTHER; note = 2'-O-methyluridine-3'-phosphate
  modified_base 17: mod_base = OTHER; note = 2'-O-methyluridine-3'-phosphate
  modified_base 18: mod_base = OTHER; note = 2'-O-methylguanosine-3'-phosphate
  modified_base 19: mod_base = OTHER; note = 2'-O-methyladenosine-3'-phosphate
  modified_base 20: mod_base = OTHER; note = 2'-O-methyladenosine-3'-phosphate
  modified_base 21: mod_base = OTHER; note = 2'-O-methyluridine-3'-phosphate ((2S,4R)-1-[29-[[2-(acetylamino)-2-deoxy-beta-D-galactopyra nosyl]oxy]-14,14-bis[[3-[[3-[[5-[[2-(acetylamino)-2-deoxy-b eta-D-galactopyranosyl]oxy]-1-oxopentyl]amino]propyl]amino] -3-oxopropoxy]methyl]-1,12,19,25-tetraoxo-16-oxa-13,20,24-t riazanonacos-1-yl]-4-hydroxy-2-pyrrolidinyl)methyl ester
gccaccttggctaccttgaat

SEQ ID NO: 1732 - RNA, 21 nt, synthetic construct
  source 1..21: mol_type = other RNA
  modified_base 1: mod_base = OTHER; note = 2'-O-methylcytidine-3'-phosphorothioate
  modified_base 2: mod_base = OTHER; note = 2'-O-methyluridine-3'-phosphorothioate
  modified_base 3: mod_base = OTHER; note = 2'-O-methyluridine-3'-phosphate
  modified_base 4: mod_base = OTHER; note = 2'-O-methylguanosine-3'-phosphate
  modified_base 5: mod_base = OTHER; note = 2'-O-methylguanosine-3'-phosphate
  modified_base 6: mod_base = OTHER; note = 2'-O-methylcytidine-3'-phosphate
  modified_base 7: mod_base = OTHER; note = 2'-deoxy-2'-fluorouridine-3'-phosphate
  modified_base 8: mod_base = OTHER; note = 2'-O-methyladenosine-3'-phosphate
  modified_base 9: mod_base = OTHER; note = 2'-deoxy-2'-fluorocytidine-3'-phosphate
  modified_base 10: mod_base = OTHER; note = 2'-deoxy-2'-fluorocytidine-3'-phosphate
  modified_base 11: mod_base = OTHER; note = 2'-deoxy-2'-fluorouridine-3'-phosphate
  modified_base 12: mod_base = OTHER; note = 2'-O-methyluridine-3'-phosphate
  modified_base 13: mod_base = OTHER; note = 2'-O-methylguanosine-3'-phosphate
  modified_base 14: mod_base = OTHER; note = 2'-O-methyladenosine-3'-phosphate
  modified_base 15: mod_base = OTHER; note = 2'-O-methyladenosine-3'-phosphate
  modified_base 16: mod_base = OTHER; note = 2'-O-methyladenosine-3'-phosphate
  modified_base 17: mod_base = OTHER; note = 2'-O-methyladenosine-3'-phosphate
  modified_base 18: mod_base = OTHER; note = 2'-O-methylcytidine-3'-phosphate
  modified_base 19: mod_base = OTHER; note = 2'-O-methylcytidine-3'-phosphate
  modified_base 20: mod_base = OTHER; note = 2'-O-methyladenosine-3'-phosphate
  modified_base 21: mod_base = OTHER; note = 2'-O-methyluridine-3'-phosphate ((2S,4R)-1-[29-[[2-(acetylamino)-2-deoxy-beta-D-galactopyra nosyl]oxy]-14,14-bis[[3-[[3-[[5-[[2-(acetylamino)-2-deoxy-b eta-D-galactopyranosyl]oxy]-1-oxopentyl]amino]propyl]amino] -3-oxopropoxy]methyl]-1,12,19,25-tetraoxo-16-oxa-13,20,24-t riazanonacos-1-yl]-4-hydroxy-2-pyrrolidinyl)methyl ester
cttggctaccttgaaaaccat

SEQ ID NO: 1733 - RNA, 21 nt, synthetic construct
  source 1..21: mol_type = other RNA
  modified_base 1: mod_base = OTHER; note = 2'-O-methyluridine-3'-phosphorothioate
  modified_base 2: mod_base = OTHER; note = 2'-O-methyladenosine-3'-phosphorothioate
  modified_base 3: mod_base = OTHER; note = 2'-O-methylcytidine-3'-phosphate
  modified_base 4: mod_base = OTHER; note = 2'-O-methylcytidine-3'-phosphate
  modified_base 5: mod_base = OTHER; note = 2'-O-methyluridine-3'-phosphate
  modified_base 6: mod_base = OTHER; note = 2'-O-methyluridine-3'-phosphate
  modified_base 7: mod_base = OTHER; note = 2'-deoxy-2'-fluoroguanosine-3'-phosphate
  modified_base 8: mod_base = OTHER; note = 2'-O-methyladenosine-3'-phosphate
  modified_base 9: mod_base = OTHER; note = 2'-deoxy-2'-fluoroadenosine-3'-phosphate
  modified_base 10: mod_base = OTHER; note = 2'-deoxy-2'-fluoroadenosine-3'-phosphate
  modified_base 11: mod_base = OTHER; note = 2'-deoxy-2'-fluoroadenosine-3'-phosphate
  modified_base 12: mod_base = OTHER; note = 2'-O-methylcytidine-3'-phosphate
  modified_base 13: mod_base = OTHER; note = 2'-O-methylcytidine-3'-phosphate
  modified_base 14: mod_base = OTHER; note = 2'-O-methyladenosine-3'-phosphate
  modified_base 15: mod_base = OTHER; note = 2'-O-methylguanosine-3'-phosphate
  modified_base 16: mod_base = OTHER; note = 2'-O-methylcytidine-3'-phosphate
  modified_base 17: mod_base = OTHER; note = 2'-O-methyladenosine-3'-phosphate
  modified_base 18: mod_base = OTHER; note = 2'-O-methyladenosine-3'-phosphate
  modified_base 19: mod_base = OTHER; note = 2'-O-methylguanosine-3'-phosphate
  modified_base 20: mod_base = OTHER; note = 2'-O-methyluridine-3'-phosphate
  modified_base 21: mod_base = OTHER; note = 2'-O-methyluridine-3'-phosphate ((2S,4R)-1-[29-[[2-(acetylamino)-2-deoxy-beta-D-galactopyra nosyl]oxy]-14,14-bis[[3-[[3-[[5-[[2-(acetylamino)-2-deoxy-b eta-D-galactopyranosyl]oxy]-1-oxopentyl]amino]propyl]amino] -3-oxopropoxy]methyl]-1,12,19,25-tetraoxo-16-oxa-13,20,24-t riazanonacos-1-yl]-4-hydroxy-2-pyrrolidinyl)methyl ester
taccttgaaaaccagcaagtt

SEQ ID NO: 1734 - RNA, 21 nt, synthetic construct
  source 1..21: mol_type = other RNA
  modified_base 1: mod_base = OTHER; note = 2'-O-methyladenosine-3'-phosphorothioate
  modified_base 2: mod_base = OTHER; note = 2'-O-methyladenosine-3'-phosphorothioate
  modified_base 3: mod_base = OTHER; note = 2'-O-methylcytidine-3'-phosphate
  modified_base 4: mod_base = OTHER; note = 2'-O-methylcytidine-3'-phosphate
  modified_base 5: mod_base = OTHER; note = 2'-O-methyladenosine-3'-phosphate
  modified_base 6: mod_base = OTHER; note = 2'-O-methylguanosine-3'-phosphate
  modified_base 7: mod_base = OTHER; note = 2'-deoxy-2'-fluorocytidine-3'-phosphate
  modified_base 8: mod_base = OTHER; note = 2'-O-methyladenosine-3'-phosphate
  modified_base 9: mod_base = OTHER; note = 2'-deoxy-2'-fluoroadenosine-3'-phosphate
  modified_base 10: mod_base = OTHER; note = 2'-deoxy-2'-fluoroguanosine-3'-phosphate
  modified_base 11: mod_base = OTHER; note = 2'-deoxy-2'-fluorouridine-3'-phosphate
  modified_base 12: mod_base = OTHER; note = 2'-O-methylcytidine-3'-phosphate
  modified_base 13: mod_base = OTHER; note = 2'-O-methylcytidine-3'-phosphate
  modified_base 14: mod_base = OTHER; note = 2'-O-methylcytidine-3'-phosphate
  modified_base 15: mod_base = OTHER; note = 2'-O-methyladenosine-3'-phosphate
  modified_base 16: mod_base = OTHER; note = 2'-O-methylcytidine-3'-phosphate
  modified_base 17: mod_base = OTHER; note = 2'-O-methylcytidine-3'-phosphate
  modified_base 18: mod_base = OTHER; note = 2'-O-methyluridine-3'-phosphate
  modified_base 19: mod_base = OTHER; note = 2'-O-methylcytidine-3'-phosphate
  modified_base 20: mod_base = OTHER; note = 2'-O-methyluridine-3'-phosphate
  modified_base 21: mod_base = OTHER; note = 2'-O-methyluridine-3'-phosphate ((2S,4R)-1-[29-[[2-(acetylamino)-2-deoxy-beta-D-galactopyra nosyl]oxy]-14,14-bis[[3-[[3-[[5-[[2-(acetylamino)-2-deoxy-b eta-D-galactopyranosyl]oxy]-1-oxopentyl]amino]propyl]amino] -3-oxopropoxy]methyl]-1,12,19,25-tetraoxo-16-oxa-13,20,24-t riazanonacos-1-yl]-4-hydroxy-2-pyrrolidinyl)methyl ester
aaccagcaagtcccacctctt

SEQ ID NO: 1735 - RNA, 21 nt, synthetic construct
  source 1..21: mol_type = other RNA
  modified_base 1: mod_base = OTHER; note = 2'-O-methyladenosine-3'-phosphorothioate
  modified_base 2: mod_base = OTHER; note = 2'-O-methyladenosine-3'-phosphorothioate
  modified_base 3: mod_base = OTHER; note = 2'-O-methylguanosine-3'-phosphate
  modified_base 4: mod_base = OTHER; note = 2'-O-methyluridine-3'-phosphate
  modified_base 5: mod_base = OTHER; note = 2'-O-methylcytidine-3'-phosphate
  modified_base 6: mod_base = OTHER; note = 2'-O-methylcytidine-3'-phosphate
  modified_base 7: mod_base = OTHER; note = 2'-deoxy-2'-fluorocytidine-3'-phosphate
  modified_base 8: mod_base = OTHER; note = 2'-O-methyladenosine-3'-phosphate
  modified_base 9: mod_base = OTHER; note = 2'-deoxy-2'-fluorocytidine-3'-phosphate
  modified_base 10: mod_base = OTHER; note = 2'-deoxy-2'-fluorocytidine-3'-phosphate
  modified_base 11: mod_base = OTHER; note = 2'-deoxy-2'-fluorouridine-3'-phosphate
  modified_base 12: mod_base = OTHER; note = 2'-O-methylcytidine-3'-phosphate
  modified_base 13: mod_base = OTHER; note = 2'-O-methyluridine-3'-phosphate
  modified_base 14: mod_base = OTHER; note = 2'-O-methylguanosine-3'-phosphate
  modified_base 15: mod_base = OTHER; note = 2'-O-methyluridine-3'-phosphate
  modified_base 16: mod_base = OTHER; note = 2'-O-methylcytidine-3'-phosphate
  modified_base 17: mod_base = OTHER; note = 2'-O-methyluridine-3'-phosphate
  modified_base 18: mod_base = OTHER; note = 2'-O-methyluridine-3'-phosphate
  modified_base 19: mod_base = OTHER; note = 2'-O-methylcytidine-3'-phosphate
  modified_base 20: mod_base = OTHER; note = 2'-O-methylcytidine-3'-phosphate
  modified_base 21: mod_base = OTHER; note = 2'-O-methyluridine-3'-phosphate ((2S,4R)-1-[29-[[2-(acetylamino)-2-deoxy-beta-D-galactopyra nosyl]oxy]-14,14-bis[[3-[[3-[[5-[[2-(acetylamino)-2-deoxy-b eta-D-galactopyranosyl]oxy]-1-oxopentyl]amino]propyl]amino] -3-oxopropoxy]methyl]-1,12,19,25-tetraoxo-16-oxa-13,20,24-t riazanonacos-1-yl]-4-hydroxy-2-pyrrolidinyl)methyl ester
aagtcccacctctgtcttcct

SEQ ID NO: 1736 - RNA, 21 nt, synthetic construct
  source 1..21: mol_type = other RNA
  modified_base 1: mod_base = OTHER; note = 2'-O-methylcytidine-3'-phosphorothioate
  modified_base 2: mod_base = OTHER; note = 2'-O-methyladenosine-3'-phosphorothioate
  modified_base 3: mod_base = OTHER; note = 2'-O-methylcytidine-3'-phosphate
  modified_base 4: mod_base = OTHER; note = 2'-O-methylcytidine-3'-phosphate
  modified_base 5: mod_base = OTHER; note = 2'-O-methyluridine-3'-phosphate
  modified_base 6: mod_base = OTHER; note = 2'-O-methylcytidine-3'-phosphate
  modified_base 7: mod_base = OTHER; note = 2'-deoxy-2'-fluorouridine-3'-phosphate
  modified_base 8: mod_base = OTHER; note = 2'-O-methylguanosine-3'-phosphate
  modified_base 9: mod_base = OTHER; note = 2'-deoxy-2'-fluorouridine-3'-phosphate
  modified_base 10: mod_base = OTHER; note = 2'-deoxy-2'-fluorocytidine-3'-phosphate
  modified_base 11: mod_base = OTHER; note = 2'-deoxy-2'-fluorouridine-3'-phosphate
  modified_base 12: mod_base = OTHER; note = 2'-O-methyluridine-3'-phosphate
  modified_base 13: mod_base = OTHER; note = 2'-O-methylcytidine-3'-phosphate
  modified_base 14: mod_base = OTHER; note = 2'-O-methylcytidine-3'-phosphate
  modified_base 15: mod_base = OTHER; note = 2'-O-methylcytidine-3'-phosphate
  modified_base 16: mod_base = OTHER; note = 2'-O-methyladenosine-3'-phosphate
  modified_base 17: mod_base = OTHER; note = 2'-O-methyluridine-3'-phosphate
  modified_base 18: mod_base = OTHER; note = 2'-O-methylguanosine-3'-phosphate
  modified_base 19: mod_base = OTHER; note = 2'-O-methyluridine-3'-phosphate
  modified_base 20: mod_base = OTHER; note = 2'-O-methylcytidine-3'-phosphate
  modified_base 21: mod_base = OTHER; note = 2'-O-methyluridine-3'-phosphate ((2S,4R)-1-[29-[[2-(acetylamino)-2-deoxy-beta-D-galactopyra nosyl]oxy]-14,14-bis[[3-[[3-[[5-[[2-(acetylamino)-2-deoxy-b eta-D-galactopyranosyl]oxy]-1-oxopentyl]amino]propyl]amino] -3-oxopropoxy]methyl]-1,12,19,25-tetraoxo-16-oxa-13,20,24-t riazanonacos-1-yl]-4-hydroxy-2-pyrrolidinyl)methyl ester
cacctctgtcttcccatgtct

SEQ ID NO: 1737 - RNA, 21 nt, synthetic construct
  source 1..21: mol_type = other RNA
  modified_base 1: mod_base = OTHER; note = 2'-O-methylcytidine-3'-phosphorothioate
  modified_base 2: mod_base = OTHER; note = 2'-O-methyluridine-3'-phosphorothioate
  modified_base 3: mod_base = OTHER; note = 2'-O-methylguanosine-3'-phosphate
  modified_base 4: mod_base = OTHER; note = 2'-O-methyluridine-3'-phosphate
  modified_base 5: mod_base = OTHER; note = 2'-O-methylcytidine-3'-phosphate
  modified_base 6: mod_base = OTHER; note = 2'-O-methyluridine-3'-phosphate
  modified_base 7: mod_base = OTHER; note = 2'-deoxy-2'-fluorouridine-3'-phosphate
  modified_base 8: mod_base = OTHER; note = 2'-O-methylcytidine-3'-phosphate
  modified_base 9: mod_base = OTHER; note = 2'-deoxy-2'-fluorocytidine-3'-phosphate
  modified_base 10: mod_base = OTHER; note = 2'-deoxy-2'-fluorocytidine-3'-phosphate
  modified_base 11: mod_base = OTHER; note = 2'-deoxy-2'-fluoroadenosine-3'-phosphate
  modified_base 12: mod_base = OTHER; note = 2'-O-methyluridine-3'-phosphate
  modified_base 13: mod_base = OTHER; note = 2'-O-methylguanosine-3'-phosphate
  modified_base 14: mod_base = OTHER; note = 2'-O-methyluridine-3'-phosphate
  modified_base 15: mod_base = OTHER; note = 2'-O-methylcytidine-3'-phosphate
  modified_base 16: mod_base = OTHER; note = 2'-O-methylcytidine-3'-phosphate
  modified_base 17: mod_base = OTHER; note = 2'-O-methyladenosine-3'-phosphate
  modified_base 18: mod_base = OTHER; note = 2'-O-methylguanosine-3'-phosphate
  modified_base 19: mod_base = OTHER; note = 2'-O-methyluridine-3'-phosphate
  modified_base 20: mod_base = OTHER; note = 2'-O-methylcytidine-3'-phosphate
  modified_base 21: mod_base = OTHER; note = 2'-O-methyluridine-3'-phosphate ((2S,4R)-1-[29-[[2-(acetylamino)-2-deoxy-beta-D-galactopyra nosyl]oxy]-14,14-bis[[3-[[3-[[5-[[2-(acetylamino)-2-deoxy-b eta-D-galactopyranosyl]oxy]-1-oxopentyl]amino]propyl]amino] -3-oxopropoxy]methyl]-1,12,19,25-tetraoxo-16-oxa-13,20,24-t riazanonacos-1-yl]-4-hydroxy-2-pyrrolidinyl)methyl ester
ctgtcttcccatgtccagtct

SEQ ID NO: 1738 - RNA, 21 nt, synthetic construct
  source 1..21: mol_type = other RNA
  modified_base 1: mod_base = OTHER; note = 2'-O-methyluridine-3'-phosphorothioate
  modified_base 2: mod_base = OTHER; note = 2'-O-methyluridine-3'-phosphorothioate
  modified_base 3: mod_base = OTHER; note = 2'-O-methylcytidine-3'-phosphate
  modified_base 4: mod_base = OTHER; note = 2'-O-methylcytidine-3'-phosphate
  modified_base 5: mod_base = OTHER; note = 2'-O-methylcytidine-3'-phosphate
  modified_base 6: mod_base = OTHER; note = 2'-O-methyladenosine-3'-phosphate
  modified_base 7: mod_base = OTHER; note = 2'-deoxy-2'-fluorouridine-3'-phosphate
  modified_base 8: mod_base = OTHER; note = 2'-O-methylguanosine-3'-phosphate
  modified_base 9: mod_base = OTHER; note = 2'-deoxy-2'-fluorouridine-3'-phosphate
  modified_base 10: mod_base = OTHER; note = 2'-deoxy-2'-fluorocytidine-3'-phosphate
  modified_base 11: mod_base = OTHER; note = 2'-deoxy-2'-fluorocytidine-3'-phosphate
  modified_base 12: mod_base = OTHER; note = 2'-O-methyladenosine-3'-phosphate
  modified_base 13: mod_base = OTHER; note = 2'-O-methylguanosine-3'-phosphate
  modified_base 14: mod_base = OTHER; note = 2'-O-methyluridine-3'-phosphate
  modified_base 15: mod_base = OTHER; note = 2'-O-methylcytidine-3'-phosphate
  modified_base 16: mod_base = OTHER; note = 2'-O-methyluridine-3'-phosphate
  modified_base 17: mod_base = OTHER; note = 2'-O-methylguanosine-3'-phosphate
  modified_base 18: mod_base = OTHER; note = 2'-O-methyladenosine-3'-phosphate
  modified_base 19: mod_base = OTHER; note = 2'-O-methyluridine-3'-phosphate
  modified_base 20: mod_base = OTHER; note = 2'-O-methyluridine-3'-phosphate
  modified_base 21: mod_base = OTHER; note = 2'-O-methyluridine-3'-phosphate ((2S,4R)-1-[29-[[2-(acetylamino)-2-deoxy-beta-D-galactopyra nosyl]oxy]-14,14-bis[[3-[[3-[[5-[[2-(acetylamino)-2-deoxy-b eta-D-galactopyranosyl]oxy]-1-oxopentyl]amino]propyl]amino] -3-oxopropoxy]methyl]-1,12,19,25-tetraoxo-16-oxa-13,20,24-t riazanonacos-1-yl]-4-hydroxy-2-pyrrolidinyl)methyl ester
ttcccatgtccagtctgattt

SEQ ID NO: 1739 - RNA, 21 nt, synthetic construct
  source 1..21: mol_type = other RNA
  modified_base 1: mod_base = OTHER; note = 2'-O-methylcytidine-3'-phosphorothioate
  modified_base 2: mod_base = OTHER; note = 2'-O-methylcytidine-3'-phosphorothioate
  modified_base 3: mod_base = OTHER; note = 2'-O-methyladenosine-3'-phosphate
  modified_base 4: mod_base = OTHER; note = 2'-O-methylguanosine-3'-phosphate
  modified_base 5: mod_base = OTHER; note = 2'-O-methyluridine-3'-phosphate
  modified_base 6: mod_base = OTHER; note = 2'-O-methylcytidine-3'-phosphate
  modified_base 7: mod_base = OTHER; note = 2'-deoxy-2'-fluorouridine-3'-phosphate
  modified_base 8: mod_base = OTHER; note = 2'-O-methylguanosine-3'-phosphate
  modified_base 9: mod_base = OTHER; note = 2'-deoxy-2'-fluoroadenosine-3'-phosphate
  modified_base 10: mod_base = OTHER; note = 2'-deoxy-2'-fluorouridine-3'-phosphate
  modified_base 11: mod_base = OTHER; note = 2'-deoxy-2'-fluorouridine-3'-phosphate
  modified_base 12: mod_base = OTHER; note = 2'-O-methylguanosine-3'-phosphate
  modified_base 13: mod_base = OTHER; note = 2'-O-methylcytidine-3'-phosphate
  modified_base 14: mod_base = OTHER; note = 2'-O-methyluridine-3'-phosphate
  modified_base 15: mod_base = OTHER; note = 2'-O-methylguanosine-3'-phosphate
  modified_base 16: mod_base = OTHER; note = 2'-O-methylguanosine-3'-phosphate
  modified_base 17: mod_base = OTHER; note = 2'-O-methyladenosine-3'-phosphate
  modified_base 18: mod_base = OTHER; note = 2'-O-methyladenosine-3'-phosphate
  modified_base 19: mod_base = OTHER; note = 2'-O-methyladenosine-3'-phosphate
  modified_base 20: mod_base = OTHER; note = 2'-O-methyladenosine-3'-phosphate
  modified_base 21: mod_base = OTHER; note = 2'-O-methyluridine-3'-phosphate ((2S,4R)-1-[29-[[2-(acetylamino)-2-deoxy-beta-D-galactopyra nosyl]oxy]-14,14-bis[[3-[[3-[[5-[[2-(acetylamino)-2-deoxy-b eta-D-galactopyranosyl]oxy]-1-oxopentyl]amino]propyl]amino] -3-oxopropoxy]methyl]-1,12,19,25-tetraoxo-16-oxa-13,20,24-t riazanonacos-1-yl]-4-hydroxy-2-pyrrolidinyl)methyl ester
ccagtctgattgctggaaaat

SEQ ID NO: 1740 - RNA, 21 nt, synthetic construct
  source 1..21: mol_type = other RNA
  modified_base 1: mod_base = OTHER; note = 2'-O-methyluridine-3'-phosphorothioate
  modified_base 2: mod_base = OTHER; note = 2'-O-methylguanosine-3'-phosphorothioate
  modified_base 3: mod_base = OTHER; note = 2'-O-methyladenosine-3'-phosphate
  modified_base 4: mod_base = OTHER; note = 2'-O-methyluridine-3'-phosphate
  modified_base 5: mod_base = OTHER; note = 2'-O-methyluridine-3'-phosphate
  modified_base 6: mod_base = OTHER; note = 2'-O-methylguanosine-3'-phosphate
  modified_base 7: mod_base = OTHER; note = 2'-deoxy-2'-fluorocytidine-3'-phosphate
  modified_base 8: mod_base = OTHER; note = 2'-O-methyluridine-3'-phosphate
  modified_base 9: mod_base = OTHER; note = 2'-deoxy-2'-fluoroguanosine-3'-phosphate
  modified_base 10: mod_base = OTHER; note = 2'-deoxy-2'-fluoroguanosine-3'-phosphate
  modified_base 11: mod_base = OTHER; note = 2'-deoxy-2'-fluoroadenosine-3'-phosphate
  modified_base 12: mod_base = OTHER; note = 2'-O-methyladenosine-3'-phosphate
  modified_base 13: mod_base = OTHER; note = 2'-O-methyladenosine-3'-phosphate
  modified_base 14: mod_base = OTHER; note = 2'-O-methyladenosine-3'-phosphate
  modified_base 15: mod_base = OTHER; note = 2'-O-methylguanosine-3'-phosphate
  modified_base 16: mod_base = OTHER; note = 2'-O-methylguanosine-3'-phosphate
  modified_base 17: mod_base = OTHER; note = 2'-O-methylguanosine-3'-phosphate
  modified_base 18: mod_base = OTHER; note = 2'-O-methyladenosine-3'-phosphate
  modified_base 19: mod_base = OTHER; note = 2'-O-methyladenosine-3'-phosphate
  modified_base 20: mod_base = OTHER; note = 2'-O-methyladenosine-3'-phosphate
  modified_base 21: mod_base = OTHER; note = 2'-O-methyluridine-3'-phosphate ((2S,4R)-1-[29-[[2-(acetylamino)-2-deoxy-beta-D-galactopyra nosyl]oxy]-14,14-bis[[3-[[3-[[5-[[2-(acetylamino)-2-deoxy-b eta-D-galactopyranosyl]oxy]-1-oxopentyl]amino]propyl]amino] -3-oxopropoxy]methyl]-1,12,19,25-tetraoxo-16-oxa-13,20,24-t riazanonacos-1-yl]-4-hydroxy-2-pyrrolidinyl)methyl ester
tgattgctggaaaagggaaat

SEQ ID NO: 1741 - RNA, 21 nt, synthetic construct
  source 1..21: mol_type = other RNA
  modified_base 1: mod_base = OTHER; note = 2'-O-methylcytidine-3'-phosphorothioate
  modified_base 2: mod_base = OTHER; note = 2'-O-methyluridine-3'-phosphorothioate
  modified_base 3: mod_base = OTHER; note = 2'-O-methylguanosine-3'-phosphate
  modified_base 4: mod_base = OTHER; note = 2'-O-methylguanosine-3'-phosphate
  modified_base 5: mod_base = OTHER; note = 2'-O-methyladenosine-3'-phosphate
  modified_base 6: mod_base = OTHER; note = 2'-O-methyladenosine-3'-phosphate
  modified_base 7: mod_base = OTHER; note = 2'-deoxy-2'-fluoroadenosine-3'-phosphate
  modified_base 8: mod_base = OTHER; note = 2'-O-methyladenosine-3'-phosphate
  modified_base 9: mod_base = OTHER; note = 2'-deoxy-2'-fluoroguanosine-3'-phosphate
  modified_base 10: mod_base = OTHER; note = 2'-deoxy-2'-fluoroguanosine-3'-phosphate
  modified_base 11: mod_base = OTHER; note = 2'-deoxy-2'-fluoroguanosine-3'-phosphate
  modified_base 12: mod_base = OTHER; note = 2'-O-methyladenosine-3'-phosphate
  modified_base 13: mod_base = OTHER; note = 2'-O-methyladenosine-3'-phosphate
  modified_base 14: mod_base = OTHER; note = 2'-O-methyladenosine-3'-phosphate
  modified_base 15: mod_base = OTHER; note = 2'-O-methylguanosine-3'-phosphate
  modified_base 16: mod_base = OTHER; note = 2'-O-methylcytidine-3'-phosphate
  modified_base 17: mod_base = OTHER; note = 2'-O-methylcytidine-3'-phosphate
  modified_base 18: mod_base = OTHER; note = 2'-O-methyladenosine-3'-phosphate
  modified_base 19: mod_base = OTHER; note = 2'-O-methyluridine-3'-phosphate
  modified_base 20: mod_base = OTHER; note = 2'-O-methyluridine-3'-phosphate
  modified_base 21: mod_base = OTHER; note = 2'-O-methyluridine-3'-phosphate ((2S,4R)-1-[29-[[2-(acetylamino)-2-deoxy-beta-D-galactopyra nosyl]oxy]-14,14-bis[[3-[[3-[[5-[[2-(acetylamino)-2-deoxy-b eta-D-galactopyranosyl]oxy]-1-oxopentyl]amino]propyl]amino] -3-oxopropoxy]methyl]-1,12,19,25-tetraoxo-16-oxa-13,20,24-t riazanonacos-1-yl]-4-hydroxy-2-pyrrolidinyl)methyl ester
ctggaaaagggaaagccattt

SEQ ID NO: 1742 - RNA, 21 nt, synthetic construct
  source 1..21: mol_type = other RNA
  modified_base 1: mod_base = OTHER; note = 2'-O-methyladenosine-3'-phosphorothioate
  modified_base 2: mod_base = OTHER; note = 2'-O-methyladenosine-3'-phosphorothioate
  modified_base 3: mod_base = OTHER; note = 2'-O-methylguanosine-3'-phosphate
  modified_base 4: mod_base = OTHER; note = 2'-O-methylguanosine-3'-phosphate
  modified_base 5: mod_base = OTHER; note = 2'-O-methylguanosine-3'-phosphate
  modified_base 6: mod_base = OTHER; note = 2'-O-methyladenosine-3'-phosphate
  modified_base 7: mod_base = OTHER; note = 2'-deoxy-2'-fluoroadenosine-3'-phosphate
  modified_base 8: mod_base = OTHER; note = 2'-O-methyladenosine-3'-phosphate
  modified_base 9: mod_base = OTHER; note = 2'-deoxy-2'-fluoroguanosine-3'-phosphate
  modified_base 10: mod_base = OTHER; note = 2'-deoxy-2'-fluorocytidine-3'-phosphate
  modified_base 11: mod_base = OTHER; note = 2'-deoxy-2'-fluorocytidine-3'-phosphate
  modified_base 12: mod_base = OTHER; note = 2'-O-methyladenosine-3'-phosphate
  modified_base 13: mod_base = OTHER; note = 2'-O-methyluridine-3'-phosphate
  modified_base 14: mod_base = OTHER; note = 2'-O-methyluridine-3'-phosphate
  modified_base 15: mod_base = OTHER; note = 2'-O-methyluridine-3'-phosphate
  modified_base 16: mod_base = OTHER; note = 2'-O-methyluridine-3'-phosphate
  modified_base 17: mod_base = OTHER; note = 2'-O-methylguanosine-3'-phosphate
  modified_base 18: mod_base = OTHER; note = 2'-O-methyluridine-3'-phosphate
  modified_base 19: mod_base = OTHER; note = 2'-O-methylcytidine-3'-phosphate
  modified_base 20: mod_base = OTHER; note = 2'-O-methyluridine-3'-phosphate
  modified_base 21: mod_base = OTHER; note = 2'-O-methyluridine-3'-phosphate ((2S,4R)-1-[29-[[2-(acetylamino)-2-deoxy-beta-D-galactopyra nosyl]oxy]-14,14-bis[[3-[[3-[[5-[[2-(acetylamino)-2-deoxy-b eta-D-galactopyranosyl]oxy]-1-oxopentyl]amino]propyl]amino] -3-oxopropoxy]methyl]-1,12,19,25-tetraoxo-16-oxa-13,20,24-t riazanonacos-1-yl]-4-hydroxy-2-pyrrolidinyl)methyl ester
aagggaaagccattttgtctt

SEQ ID NO: 1743 - RNA, 21 nt, synthetic construct
  source 1..21: mol_type = other RNA
  modified_base 1: mod_base = OTHER; note = 2'-O-methyladenosine-3'-phosphorothioate
  modified_base 2: mod_base = OTHER; note = 2'-O-methylguanosine-3'-phosphorothioate
  modified_base 3: mod_base = OTHER; note = 2'-O-methylcytidine-3'-phosphate
  modified_base 4: mod_base = OTHER; note = 2'-O-methylcytidine-3'-phosphate
  modified_base 5: mod_base = OTHER; note = 2'-O-methyladenosine-3'-phosphate
  modified_base 6: mod_base = OTHER; note = 2'-O-methyluridine-3'-phosphate
  modified_base 7: mod_base = OTHER; note = 2'-deoxy-2'-fluorouridine-3'-phosphate
  modified_base 8: mod_base = OTHER; note = 2'-O-methyluridine-3'-phosphate
  modified_base 9: mod_base = OTHER; note = 2'-deoxy-2'-fluorouridine-3'-phosphate
  modified_base 10: mod_base = OTHER; note = 2'-deoxy-2'-fluoroguanosine-3'-phosphate
  modified_base 11: mod_base = OTHER; note = 2'-deoxy-2'-fluorouridine-3'-phosphate
  modified_base 12: mod_base = OTHER; note = 2'-O-methylcytidine-3'-phosphate
  modified_base 13: mod_base = OTHER; note = 2'-O-methyluridine-3'-phosphate
  modified_base 14: mod_base = OTHER; note = 2'-O-methylcytidine-3'-phosphate
  modified_base 15: mod_base = OTHER; note = 2'-O-methyluridine-3'-phosphate
  modified_base 16: mod_base = OTHER; note = 2'-O-methylcytidine-3'-phosphate
  modified_base 17: mod_base = OTHER; note = 2'-O-methyluridine-3'-phosphate
  modified_base 18: mod_base = OTHER; note = 2'-O-methyladenosine-3'-phosphate
  modified_base 19: mod_base = OTHER; note = 2'-O-methyluridine-3'-phosphate
  modified_base 20: mod_base = OTHER; note = 2'-O-methylguanosine-3'-phosphate
  modified_base 21: mod_base = OTHER; note = 2'-O-methyluridine-3'-phosphate ((2S,4R)-1-[29-[[2-(acetylamino)-2-deoxy-beta-D-galactopyra nosyl]oxy]-14,14-bis[[3-[[3-[[5-[[2-(acetylamino)-2-deoxy-b eta-D-galactopyranosyl]oxy]-1-oxopentyl]amino]propyl]amino] -3-oxopropoxy]methyl]-1,12,19,25-tetraoxo-16-oxa-13,20,24-t riazanonacos-1-yl]-4-hydroxy-2-pyrrolidinyl)methyl ester
agccattttgtctctctatgt

SEQ ID NO: 1744 - RNA, 21 nt, synthetic construct
  source 1..21: mol_type = other RNA
  modified_base 1: mod_base = OTHER; note = 2'-O-methyluridine-3'-phosphorothioate
  modified_base 2: mod_base = OTHER; note = 2'-O-methyluridine-3'-phosphorothioate
  modified_base 3: mod_base = OTHER; note = 2'-O-methyluridine-3'-phosphate
  modified_base 4: mod_base = OTHER; note = 2'-O-methyluridine-3'-phosphate
  modified_base 5: mod_base = OTHER; note = 2'-O-methylguanosine-3'-phosphate
  modified_base 6: mod_base = OTHER; note = 2'-O-methyluridine-3'-phosphate
  modified_base 7: mod_base = OTHER; note = 2'-deoxy-2'-fluorocytidine-3'-phosphate
  modified_base 8: mod_base = OTHER; note = 2'-O-methyluridine-3'-phosphate
  modified_base 9: mod_base = OTHER; note = 2'-deoxy-2'-fluorocytidine-3'-phosphate
  modified_base 10: mod_base = OTHER; note = 2'-deoxy-2'-fluorouridine-3'-phosphate
  modified_base 11: mod_base = OTHER; note = 2'-deoxy-2'-fluorocytidine-3'-phosphate
  modified_base 12: mod_base = OTHER; note = 2'-O-methyluridine-3'-phosphate
  modified_base 13: mod_base = OTHER; note = 2'-O-methyladenosine-3'-phosphate
  modified_base 14: mod_base = OTHER; note = 2'-O-methyluridine-3'-phosphate
  modified_base 15: mod_base = OTHER; note = 2'-O-methylguanosine-3'-phosphate
  modified_base 16: mod_base = OTHER; note = 2'-O-methyluridine-3'-phosphate
  modified_base 17: mod_base = OTHER; note = 2'-O-methylguanosine-3'-phosphate
  modified_base 18: mod_base = OTHER; note = 2'-O-methylguanosine-3'-phosphate
  modified_base 19: mod_base = OTHER; note = 2'-O-methyluridine-3'-phosphate
  modified_base 20: mod_base = OTHER; note = 2'-O-methylcytidine-3'-phosphate
  modified_base 21: mod_base = OTHER; note = 2'-O-methyluridine-3'-phosphate ((2S,4R)-1-[29-[[2-(acetylamino)-2-deoxy-beta-D-galactopyra nosyl]oxy]-14,14-bis[[3-[[3-[[5-[[2-(acetylamino)-2-deoxy-b eta-D-galactopyranosyl]oxy]-1-oxopentyl]amino]propyl]amino] -3-oxopropoxy]methyl]-1,12,19,25-tetraoxo-16-oxa-13,20,24-t riazanonacos-1-yl]-4-hydroxy-2-pyrrolidinyl)methyl ester
ttttgtctctctatgtggtct

SEQ ID NO: 1745 - RNA, 21 nt, synthetic construct
  source 1..21: mol_type = other RNA
  modified_base 1: mod_base = OTHER; note = 2'-O-methyluridine-3'-phosphorothioate
  modified_base 2: mod_base = OTHER; note = 2'-O-methylcytidine-3'-phosphorothioate
  modified_base 3: mod_base = OTHER; note = 2'-O-methyluridine-3'-phosphate
  modified_base 4: mod_base = OTHER; note = 2'-O-methylcytidine-3'-phosphate
  modified_base 5: mod_base = OTHER; note = 2'-O-methyluridine-3'-phosphate
  modified_base 6: mod_base = OTHER; note = 2'-O-methylcytidine-3'-phosphate
  modified_base 7: mod_base = OTHER; note = 2'-deoxy-2'-fluorouridine-3'-phosphate
  modified_base 8: mod_base = OTHER; note = 2'-O-methyladenosine-3'-phosphate
  modified_base 9: mod_base = OTHER; note = 2'-deoxy-2'-fluorouridine-3'-phosphate
  modified_base 10: mod_base = OTHER; note = 2'-deoxy-2'-fluoroguanosine-3'-phosphate
  modified_base 11: mod_base = OTHER; note = 2'-deoxy-2'-fluorouridine-3'-phosphate
  modified_base 12: mod_base = OTHER; note = 2'-O-methylguanosine-3'-phosphate
  modified_base 13: mod_base = OTHER; note = 2'-O-methylguanosine-3'-phosphate
  modified_base 14: mod_base = OTHER; note = 2'-O-methyluridine-3'-phosphate
  modified_base 15: mod_base = OTHER; note = 2'-O-methylcytidine-3'-phosphate
  modified_base 16: mod_base = OTHER; note = 2'-O-methylguanosine-3'-phosphate
  modified_base 17: mod_base = OTHER; note = 2'-O-methyladenosine-3'-phosphate
  modified_base 18: mod_base = OTHER; note = 2'-O-methylcytidine-3'-phosphate
  modified_base 19: mod_base = OTHER; note = 2'-O-methyluridine-3'-phosphate
  modified_base 20: mod_base = OTHER; note = 2'-O-methyluridine-3'-phosphate
  modified_base 21: mod_base = OTHER; note = 2'-O-methyluridine-3'-phosphate ((2S,4R)-1-[29-[[2-(acetylamino)-2-deoxy-beta-D-galactopyra nosyl]oxy]-14,14-bis[[3-[[3-[[5-[[2-(acetylamino)-2-deoxy-b eta-D-galactopyranosyl]oxy]-1-oxopentyl]amino]propyl]amino] -3-oxopropoxy]methyl]-1,12,19,25-tetraoxo-16-oxa-13,20,24-t riazanonacos-1-yl]-4-hydroxy-2-pyrrolidinyl)methyl ester
tctctctatgtggtcgacttt

SEQ ID NO: 1746 - RNA, 21 nt, synthetic construct
  source 1..21: mol_type = other RNA
  modified_base 1: mod_base = OTHER; note = 2'-O-methyluridine-3'-phosphorothioate
  modified_base 2: mod_base = OTHER; note = 2'-O-methylguanosine-3'-phosphorothioate
  modified_base 3: mod_base = OTHER; note = 2'-O-methyluridine-3'-phosphate
  modified_base 4: mod_base = OTHER; note = 2'-O-methylguanosine-3'-phosphate
  modified_base 5: mod_base = OTHER; note = 2'-O-methylguanosine-3'-phosphate
  modified_base 6: mod_base = OTHER; note = 2'-O-methyluridine-3'-phosphate
  modified_base 7: mod_base = OTHER; note = 2'-deoxy-2'-fluorocytidine-3'-phosphate
  modified_base 8: mod_base = OTHER; note = 2'-O-methylguanosine-3'-phosphate
  modified_base 9: mod_base = OTHER; note = 2'-deoxy-2'-fluoroadenosine-3'-phosphate
  modified_base 10: mod_base = OTHER; note = 2'-deoxy-2'-fluorocytidine-3'-phosphate
  modified_base 11: mod_base = OTHER; note = 2'-deoxy-2'-fluorouridine-3'-phosphate
  modified_base 12: mod_base = OTHER; note = 2'-O-methyluridine-3'-phosphate
  modified_base 13: mod_base = OTHER; note = 2'-O-methylcytidine-3'-phosphate
  modified_base 14: mod_base = OTHER; note = 2'-O-methyladenosine-3'-phosphate
  modified_base 15: mod_base = OTHER; note = 2'-O-methylcytidine-3'-phosphate
  modified_base 16: mod_base = OTHER; note = 2'-O-methylcytidine-3'-phosphate
  modified_base 17: mod_base = OTHER; note = 2'-O-methyluridine-3'-phosphate
  modified_base 18: mod_base = OTHER; note = 2'-O-methyluridine-3'-phosphate
  modified_base 19: mod_base = OTHER; note = 2'-O-methylcytidine-3'-phosphate
  modified_base 20: mod_base = OTHER; note = 2'-O-methyluridine-3'-phosphate
  modified_base 21: mod_base = OTHER; note = 2'-O-methyluridine-3'-phosphate ((2S,4R)-1-[29-[[2-(acetylamino)-2-deoxy-beta-D-galactopyra nosyl]oxy]-14,14-bis[[3-[[3-[[5-[[2-(acetylamino)-2-deoxy-b eta-D-galactopyranosyl]oxy]-1-oxopentyl]amino]propyl]amino] -3-oxopropoxy]methyl]-1,12,19,25-tetraoxo-16-oxa-13,20,24-t riazanonacos-1-yl]-4-hydroxy-2-pyrrolidinyl)methyl ester
tgtggtcgacttcaccttctt

SEQ ID NO: 1747 - RNA, 21 nt, synthetic construct
  source 1..21: mol_type = other RNA
  modified_base 1: mod_base = OTHER; note = 2'-O-methylcytidine-3'-phosphorothioate
  modified_base 2: mod_base = OTHER; note = 2'-O-methylguanosine-3'-phosphorothioate
  modified_base 3: mod_base = OTHER; note = 2'-O-methyladenosine-3'-phosphate
  modified_base 4: mod_base = OTHER; note = 2'-O-methylcytidine-3'-phosphate
  modified_base 5: mod_base = OTHER; note = 2'-O-methyluridine-3'-phosphate
  modified_base 6: mod_base = OTHER; note = 2'-O-methyluridine-3'-phosphate
  modified_base 7: mod_base = OTHER; note = 2'-deoxy-2'-fluorocytidine-3'-phosphate
  modified_base 8: mod_base = OTHER; note = 2'-O-methyladenosine-3'-phosphate
  modified_base 9: mod_base = OTHER; note = 2'-deoxy-2'-fluorocytidine-3'-phosphate
  modified_base 10: mod_base = OTHER; note = 2'-deoxy-2'-fluorocytidine-3'-phosphate
  modified_base 11: mod_base = OTHER; note = 2'-deoxy-2'-fluorouridine-3'-phosphate
  modified_base 12: mod_base = OTHER; note = 2'-O-methyluridine-3'-phosphate
  modified_base 13: mod_base = OTHER; note = 2'-O-methylcytidine-3'-phosphate
  modified_base 14: mod_base = OTHER; note = 2'-O-methyluridine-3'-phosphate
  modified_base 15: mod_base = OTHER; note = 2'-O-methylguanosine-3'-phosphate
  modified_base 16: mod_base = OTHER; note = 2'-O-methyluridine-3'-phosphate
  modified_base 17: mod_base = OTHER; note = 2'-O-methylguanosine-3'-phosphate
  modified_base 18: mod_base = OTHER; note = 2'-O-methyluridine-3'-phosphate
  modified_base 19: mod_base = OTHER; note = 2'-O-methyluridine-3'-phosphate
  modified_base 20: mod_base = OTHER; note = 2'-O-methylguanosine-3'-phosphate
  modified_base 21: mod_base = OTHER; note = 2'-O-methyluridine-3'-phosphate ((2S,4R)-1-[29-[[2-(acetylamino)-2-deoxy-beta-D-galactopyra nosyl]oxy]-14,14-bis[[3-[[3-[[5-[[2-(acetylamino)-2-deoxy-b eta-D-galactopyranosyl]oxy]-1-oxopentyl]amino]propyl]amino] -3-oxopropoxy]methyl]-1,12,19,25-tetraoxo-16-oxa-13,20,24-t riazanonacos-1-yl]-4-hydroxy-2-pyrrolidinyl)methyl ester
cgacttcaccttctgtgttgt

SEQ ID NO: 1748 - RNA, 21 nt, synthetic construct
  source 1..21: mol_type = other RNA
  modified_base 1: mod_base = OTHER; note = 2'-O-methyladenosine-3'-phosphorothioate
  modified_base 2: mod_base = OTHER; note = 2'-O-methylcytidine-3'-phosphorothioate
  modified_base 3: mod_base = OTHER; note = 2'-O-methylcytidine-3'-phosphate
  modified_base 4: mod_base = OTHER; note = 2'-O-methyluridine-3'-phosphate
  modified_base 5: mod_base = OTHER; note = 2'-O-methyluridine-3'-phosphate
  modified_base 6: mod_base = OTHER; note = 2'-O-methylcytidine-3'-phosphate
  modified_base 7: mod_base = OTHER; note = 2'-deoxy-2'-fluorouridine-3'-phosphate
  modified_base 8: mod_base = OTHER; note = 2'-O-methylguanosine-3'-phosphate
  modified_base 9: mod_base = OTHER; note = 2'-deoxy-2'-fluorouridine-3'-phosphate
  modified_base 10: mod_base = OTHER; note = 2'-deoxy-2'-fluoroguanosine-3'-phosphate
  modified_base 11: mod_base = OTHER; note = 2'-deoxy-2'-fluorouridine-3'-phosphate
  modified_base 12: mod_base = OTHER; note = 2'-O-methyluridine-3'-phosphate
  modified_base 13: mod_base = OTHER; note = 2'-O-methylguanosine-3'-phosphate
  modified_base 14: mod_base = OTHER; note = 2'-O-methylcytidine-3'-phosphate
  modified_base 15: mod_base = OTHER; note = 2'-O-methyluridine-3'-phosphate
  modified_base 16: mod_base = OTHER; note = 2'-O-methylguanosine-3'-phosphate
  modified_base 17: mod_base = OTHER; note = 2'-O-methyluridine-3'-phosphate
  modified_base 18: mod_base = OTHER; note = 2'-O-methylguanosine-3'-phosphate
  modified_base 19: mod_base = OTHER; note = 2'-O-methylguanosine-3'-phosphate
  modified_base 20: mod_base = OTHER; note = 2'-O-methyluridine-3'-phosphate
  modified_base 21: mod_base = OTHER; note = 2'-O-methyluridine-3'-phosphate ((2S,4R)-1-[29-[[2-(acetylamino)-2-deoxy-beta-D-galactopyra nosyl]oxy]-14,14-bis[[3-[[3-[[5-[[2-(acetylamino)-2-deoxy-b eta-D-galactopyranosyl]oxy]-1-oxopentyl]amino]propyl]amino] -3-oxopropoxy]methyl]-1,12,19,25-tetraoxo-16-oxa-13,20,24-t riazanonacos-1-yl]-4-hydroxy-2-pyrrolidinyl)methyl ester
accttctgtgttgctgtggtt

SEQ ID NO: 1749 - RNA, 21 nt, synthetic construct
  source 1..21: mol_type = other RNA
  modified_base 1: mod_base = OTHER; note = 2'-O-methyluridine-3'-phosphorothioate
  modified_base 2: mod_base = OTHER; note = 2'-O-methylguanosine-3'-phosphorothioate
  modified_base 3: mod_base = OTHER; note = 2'-O-methyluridine-3'-phosphate
  modified_base 4: mod_base = OTHER; note = 2'-O-methyluridine-3'-phosphate
  modified_base 5: mod_base = OTHER; note = 2'-O-methylguanosine-3'-phosphate
  modified_base 6: mod_base = OTHER; note = 2'-O-methylcytidine-3'-phosphate
  modified_base 7: mod_base = OTHER; note = 2'-deoxy-2'-fluorouridine-3'-phosphate
  modified_base 8: mod_base = OTHER; note = 2'-O-methylguanosine-3'-phosphate
  modified_base 9: mod_base = OTHER; note = 2'-deoxy-2'-fluorouridine-3'-phosphate
  modified_base 10: mod_base = OTHER; note = 2'-deoxy-2'-fluoroguanosine-3'-phosphate
  modified_base 11: mod_base = OTHER; note = 2'-deoxy-2'-fluoroguanosine-3'-phosphate
  modified_base 12: mod_base = OTHER; note = 2'-O-methyluridine-3'-phosphate
  modified_base 13: mod_base = OTHER; note = 2'-O-methylcytidine-3'-phosphate
  modified_base 14: mod_base = OTHER; note = 2'-O-methyluridine-3'-phosphate
  modified_base 15: mod_base = OTHER; note = 2'-O-methylcytidine-3'-phosphate
  modified_base 16: mod_base = OTHER; note = 2'-O-methyluridine-3'-phosphate
  modified_base 17: mod_base = OTHER; note = 2'-O-methylguanosine-3'-phosphate
  modified_base 18: mod_base = OTHER; note = 2'-O-methyluridine-3'-phosphate
  modified_base 19: mod_base = OTHER; note = 2'-O-methylcytidine-3'-phosphate
  modified_base 20: mod_base = OTHER; note = 2'-O-methyluridine-3'-phosphate
  modified_base 21: mod_base = OTHER; note = 2'-O-methyluridine-3'-phosphate ((2S,4R)-1-[29-[[2-(acetylamino)-2-deoxy-beta-D-galactopyra nosyl]oxy]-14,14-bis[[3-[[3-[[5-[[2-(acetylamino)-2-deoxy-b eta-D-galactopyranosyl]oxy]-1-oxopentyl]amino]propyl]amino] -3-oxopropoxy]methyl]-1,12,19,25-tetraoxo-16-oxa-13,20,24-t riazanonacos-1-yl]-4-hydroxy-2-pyrrolidinyl)methyl ester
tgttgctgtggtctctgtctt

SEQ ID NO: 1750 - RNA, 21 nt, synthetic construct
  source 1..21: mol_type = other RNA
  modified_base 1: mod_base = OTHER; note = 2'-O-methyluridine-3'-phosphorothioate
  modified_base 2: mod_base = OTHER; note = 2'-O-methylguanosine-3'-phosphorothioate
  modified_base 3: mod_base = OTHER; note = 2'-O-methyluridine-3'-phosphate
  modified_base 4: mod_base = OTHER; note = 2'-O-methylguanosine-3'-phosphate
  modified_base 5: mod_base = OTHER; note = 2'-O-methylguanosine-3'-phosphate
  modified_base 6: mod_base = OTHER; note = 2'-O-methyluridine-3'-phosphate
  modified_base 7: mod_base = OTHER; note = 2'-deoxy-2'-fluorocytidine-3'-phosphate
  modified_base 8: mod_base = OTHER; note = 2'-O-methyluridine-3'-phosphate
  modified_base 9: mod_base = OTHER; note = 2'-deoxy-2'-fluorocytidine-3'-phosphate
  modified_base 10: mod_base = OTHER; note = 2'-deoxy-2'-fluorouridine-3'-phosphate
  modified_base 11: mod_base = OTHER; note = 2'-deoxy-2'-fluoroguanosine-3'-phosphate
  modified_base 12: mod_base = OTHER; note = 2'-O-methyluridine-3'-phosphate
  modified_base 13: mod_base = OTHER; note = 2'-O-methylcytidine-3'-phosphate
  modified_base 14: mod_base = OTHER; note = 2'-O-methyluridine-3'-phosphate
  modified_base 15: mod_base = OTHER; note = 2'-O-methylcytidine-3'-phosphate
  modified_base 16: mod_base = OTHER; note = 2'-O-methyluridine-3'-phosphate
  modified_base 17: mod_base = OTHER; note = 2'-O-methyluridine-3'-phosphate
  modified_base 18: mod_base = OTHER; note = 2'-O-methyladenosine-3'-phosphate
  modified_base 19: mod_base = OTHER; note = 2'-O-methylcytidine-3'-phosphate
  modified_base 20: mod_base = OTHER; note = 2'-O-methyladenosine-3'-phosphate
  modified_base 21: mod_base = OTHER; note = 2'-O-methyluridine-3'-phosphate ((2S,4R)-1-[29-[[2-(acetylamino)-2-deoxy-beta-D-galactopyra nosyl]oxy]-14,14-bis[[3-[[3-[[5-[[2-(acetylamino)-2-deoxy-b eta-D-galactopyranosyl]oxy]-1-oxopentyl]amino]propyl]amino] -3-oxopropoxy]methyl]-1,12,19,25-tetraoxo-16-oxa-13,20,24-t riazanonacos-1-yl]-4-hydroxy-2-pyrrolidinyl)methyl ester
tgtggtctctgtctcttacat

SEQ ID NO: 1751 - RNA, 21 nt, synthetic construct
  source 1..21: mol_type = other RNA
  modified_base 1: mod_base = OTHER; note = 2'-O-methyluridine-3'-phosphorothioate
  modified_base 2: mod_base = OTHER; note = 2'-O-methylcytidine-3'-phosphorothioate
  modified_base 3: mod_base = OTHER; note = 2'-O-methyluridine-3'-phosphate
  modified_base 4: mod_base = OTHER; note = 2'-O-methylcytidine-3'-phosphate
  modified_base 5: mod_base = OTHER; note = 2'-O-methyluridine-3'-phosphate
  modified_base 6: mod_base = OTHER; note = 2'-O-methylguanosine-3'-phosphate
  modified_base 7: mod_base = OTHER; note = 2'-deoxy-2'-fluorouridine-3'-phosphate
  modified_base 8: mod_base = OTHER; note = 2'-O-methylcytidine-3'-phosphate
  modified_base 9: mod_base = OTHER; note = 2'-deoxy-2'-fluorouridine-3'-phosphate
  modified_base 10: mod_base = OTHER; note = 2'-deoxy-2'-fluorocytidine-3'-phosphate
  modified_base 11: mod_base = OTHER; note = 2'-deoxy-2'-fluorouridine-3'-phosphate
  modified_base 12: mod_base = OTHER; note = 2'-O-methyluridine-3'-phosphate
  modified_base 13: mod_base = OTHER; note = 2'-O-methyladenosine-3'-phosphate
  modified_base 14: mod_base = OTHER; note = 2'-O-methylcytidine-3'-phosphate
  modified_base 15: mod_base = OTHER; note = 2'-O-methyladenosine-3'-phosphate
  modified_base 16: mod_base = OTHER; note = 2'-O-methyluridine-3'-phosphate
  modified_base 17: mod_base = OTHER; note = 2'-O-methylcytidine-3'-phosphate
  modified_base 18: mod_base = OTHER; note = 2'-O-methyladenosine-3'-phosphate
  modified_base 19: mod_base = OTHER; note = 2'-O-methyluridine-3'-phosphate
  modified_base 20: mod_base = OTHER; note = 2'-O-methylguanosine-3'-phosphate
  modified_base 21: mod_base = OTHER; note = 2'-O-methyluridine-3'-phosphate ((2S,4R)-1-[29-[[2-(acetylamino)-2-deoxy-beta-D-galactopyra nosyl]oxy]-14,14-bis[[3-[[3-[[5-[[2-(acetylamino)-2-deoxy-b eta-D-galactopyranosyl]oxy]-1-oxopentyl]amino]propyl]amino] -3-oxopropoxy]methyl]-1,12,19,25-tetraoxo-16-oxa-13,20,24-t riazanonacos-1-yl]-4-hydroxy-2-pyrrolidinyl)methyl ester
tctctgtctcttacatcatgt

SEQ ID NO: 1752 - RNA, 21 nt, synthetic construct
  source 1..21: mol_type = other RNA
  modified_base 1: mod_base = OTHER; note = 2'-O-methyluridine-3'-phosphorothioate
  modified_base 2: mod_base = OTHER; note = 2'-O-methylcytidine-3'-phosphorothioate
  modified_base 3: mod_base = OTHER; note = 2'-O-methyluridine-3'-phosphate
  modified_base 4: mod_base = OTHER; note = 2'-O-methyluridine-3'-phosphate
  modified_base 5: mod_base = OTHER; note = 2'-O-methyladenosine-3'-phosphate
  modified_base 6: mod_base = OTHER; note = 2'-O-methylcytidine-3'-phosphate
  modified_base 7: mod_base = OTHER; note = 2'-deoxy-2'-fluoroadenosine-3'-phosphate
  modified_base 8: mod_base = OTHER; note = 2'-O-methyluridine-3'-phosphate
  modified_base 9: mod_base = OTHER; note = 2'-deoxy-2'-fluorocytidine-3'-phosphate
  modified_base 10: mod_base = OTHER; note = 2'-deoxy-2'-fluoroadenosine-3'-phosphate
  modified_base 11: mod_base = OTHER; note = 2'-deoxy-2'-fluorouridine-3'-phosphate
  modified_base 12: mod_base = OTHER; note = 2'-O-methylguanosine-3'-phosphate
  modified_base 13: mod_base = OTHER; note = 2'-O-methyladenosine-3'-phosphate
  modified_base 14: mod_base = OTHER; note = 2'-O-methyluridine-3'-phosphate
  modified_base 15: mod_base = OTHER; note = 2'-O-methyluridine-3'-phosphate
  modified_base 16: mod_base = OTHER; note = 2'-O-methylguanosine-3'-phosphate
  modified_base 17: mod_base = OTHER; note = 2'-O-methylcytidine-3'-phosphate
  modified_base 18: mod_base = OTHER; note = 2'-O-methyluridine-3'-phosphate
  modified_base 19: mod_base = OTHER; note = 2'-O-methylcytidine-3'-phosphate
  modified_base 20: mod_base = OTHER; note = 2'-O-methyladenosine-3'-phosphate
  modified_base 21: mod_base = OTHER; note = 2'-O-methyluridine-3'-phosphate ((2S,4R)-1-[29-[[2-(acetylamino)-2-deoxy-beta-D-galactopyra nosyl]oxy]-14,14-bis[[3-[[3-[[5-[[2-(acetylamino)-2-deoxy-b eta-D-galactopyranosyl]oxy]-1-oxopentyl]amino]propyl]amino] -3-oxopropoxy]methyl]-1,12,19,25-tetraoxo-16-oxa-13,20,24-t riazanonacos-1-yl]-4-hydroxy-2-pyrrolidinyl)methyl ester
tcttacatcatgattgctcat

SEQ ID NO: 1753 - RNA, 21 nt, synthetic construct
  source 1..21: mol_type = other RNA
  modified_base 1: mod_base = OTHER; note = 2'-O-methyladenosine-3'-phosphorothioate
  modified_base 2: mod_base = OTHER; note = 2'-O-methyluridine-3'-phosphorothioate
  modified_base 3: mod_base = OTHER; note = 2'-O-methylcytidine-3'-phosphate
  modified_base 4: mod_base = OTHER; note = 2'-O-methyladenosine-3'-phosphate
  modified_base 5: mod_base = OTHER; note = 2'-O-methyluridine-3'-phosphate
  modified_base 6: mod_base = OTHER; note = 2'-O-methylguanosine-3'-phosphate
  modified_base 7: mod_base = OTHER; note = 2'-deoxy-2'-fluoroadenosine-3'-phosphate
  modified_base 8: mod_base = OTHER; note = 2'-O-methyluridine-3'-phosphate
  modified_base 9: mod_base = OTHER; note = 2'-deoxy-2'-fluorouridine-3'-phosphate
  modified_base 10: mod_base = OTHER; note = 2'-deoxy-2'-fluoroguanosine-3'-phosphate
  modified_base 11: mod_base = OTHER; note = 2'-deoxy-2'-fluorocytidine-3'-phosphate
  modified_base 12: mod_base = OTHER; note = 2'-O-methyluridine-3'-phosphate
  modified_base 13: mod_base = OTHER; note = 2'-O-methylcytidine-3'-phosphate
  modified_base 14: mod_base = OTHER; note = 2'-O-methyladenosine-3'-phosphate
  modified_base 15: mod_base = OTHER; note = 2'-O-methylguanosine-3'-phosphate
  modified_base 16: mod_base = OTHER; note = 2'-O-methyladenosine-3'-phosphate
  modified_base 17: mod_base = OTHER; note = 2'-O-methylcytidine-3'-phosphate
  modified_base 18: mod_base = OTHER; note = 2'-O-methylcytidine-3'-phosphate
  modified_base 19: mod_base = OTHER; note = 2'-O-methylcytidine-3'-phosphate
  modified_base 20: mod_base = OTHER; note = 2'-O-methyluridine-3'-phosphate
  modified_base 21: mod_base = OTHER; note = 2'-O-methyluridine-3'-phosphate ((2S,4R)-1-[29-[[2-(acetylamino)-2-deoxy-beta-D-galactopyra nosyl]oxy]-14,14-bis[[3-[[3-[[5-[[2-(acetylamino)-2-deoxy-b eta-D-galactopyranosyl]oxy]-1-oxopentyl]amino]propyl]amino] -3-oxopropoxy]methyl]-1,12,19,25-tetraoxo-16-oxa-13,20,24-t riazanonacos-1-yl]-4-hydroxy-2-pyrrolidinyl)methyl ester
atcatgattgctcagaccctt

SEQ ID NO: 1754 - RNA, 21 nt, synthetic construct
  source 1..21: mol_type = other RNA
  modified_base 1: mod_base = OTHER; note = 2'-O-methyladenosine-3'-phosphorothioate
  modified_base 2: mod_base = OTHER; note = 2'-O-methylguanosine-3'-phosphorothioate
  modified_base 3: mod_base = OTHER; note = 2'-O-methyladenosine-3'-phosphate
  modified_base 4: mod_base = OTHER; note = 2'-O-methylcytidine-3'-phosphate
  modified_base 5: mod_base = OTHER; note = 2'-O-methylcytidine-3'-phosphate
  modified_base 6: mod_base = OTHER; note = 2'-O-methylcytidine-3'-phosphate
  modified_base 7: mod_base = OTHER; note = 2'-deoxy-2'-fluorouridine-3'-phosphate
  modified_base 8: mod_base = OTHER; note = 2'-O-methylguanosine-3'-phosphate
  modified_base 9: mod_base = OTHER; note = 2'-deoxy-2'-fluorocytidine-3'-phosphate
  modified_base 10: mod_base = OTHER; note = 2'-deoxy-2'-fluoroguanosine-3'-phosphate
  modified_base 11: mod_base = OTHER; note = 2'-deoxy-2'-fluoroguanosine-3'-phosphate
  modified_base 12: mod_base = OTHER; note = 2'-O-methyladenosine-3'-phosphate
  modified_base 13: mod_base = OTHER; note = 2'-O-methyladenosine-3'-phosphate
  modified_base 14: mod_base = OTHER; note = 2'-O-methylguanosine-3'-phosphate
  modified_base 15: mod_base = OTHER; note = 2'-O-methyladenosine-3'-phosphate
  modified_base 16: mod_base = OTHER; note = 2'-O-methyladenosine-3'-phosphate
  modified_base 17: mod_base = OTHER; note = 2'-O-methylcytidine-3'-phosphate
  modified_base 18: mod_base = OTHER; note = 2'-O-methylguanosine-3'-phosphate
  modified_base 19: mod_base = OTHER; note = 2'-O-methylcytidine-3'-phosphate
  modified_base 20: mod_base = OTHER; note = 2'-O-methyluridine-3'-phosphate
  modified_base 21: mod_base = OTHER; note = 2'-O-methyluridine-3'-phosphate ((2S,4R)-1-[29-[[2-(acetylamino)-2-deoxy-beta-D-galactopyra nosyl]oxy]-14,14-bis[[3-[[3-[[5-[[2-(acetylamino)-2-deoxy-b eta-D-galactopyranosyl]oxy]-1-oxopentyl]amino]propyl]amino] -3-oxopropoxy]methyl]-1,12,19,25-tetraoxo-16-oxa-13,20,24-t riazanonacos-1-yl]-4-hydroxy-2-pyrrolidinyl)methyl ester
agaccctgcggaagaacgctt

SEQ ID NO: 1755 - RNA, 21 nt, synthetic construct
  source 1..21: mol_type = other RNA
  modified_base 1: mod_base = OTHER; note = 2'-O-methyluridine-3'-phosphorothioate
  modified_base 2: mod_base = OTHER; note = 2'-O-methylguanosine-3'-phosphorothioate
  modified_base 3: mod_base = OTHER; note = 2'-O-methylcytidine-3'-phosphate
  modified_base 4: mod_base = OTHER; note = 2'-O-methylguanosine-3'-phosphate
  modified_base 5: mod_base = OTHER; note = 2'-O-methylguanosine-3'-phosphate
  modified_base 6: mod_base = OTHER; note = 2'-O-methyladenosine-3'-phosphate
  modified_base 7: mod_base = OTHER; note = 2'-deoxy-2'-fluoroadenosine-3'-phosphate
  modified_base 8: mod_base = OTHER; note = 2'-O-methylguanosine-3'-phosphate
  modified_base 9: mod_base = OTHER; note = 2'-deoxy-2'-fluoroadenosine-3'-phosphate
  modified_base 10: mod_base = OTHER; note = 2'-deoxy-2'-fluoroadenosine-3'-phosphate
  modified_base 11: mod_base = OTHER; note = 2'-deoxy-2'-fluorocytidine-3'-phosphate
  modified_base 12: mod_base = OTHER; note = 2'-O-methylguanosine-3'-phosphate
  modified_base 13: mod_base = OTHER; note = 2'-O-methylcytidine-3'-phosphate
  modified_base 14: mod_base = OTHER; note = 2'-O-methyluridine-3'-phosphate
  modified_base 15: mod_base = OTHER; note = 2'-O-methylcytidine-3'-phosphate
  modified_base 16: mod_base = OTHER; note = 2'-O-methyladenosine-3'-phosphate
  modified_base 17: mod_base = OTHER; note = 2'-O-methyladenosine-3'-phosphate
  modified_base 18: mod_base = OTHER; note = 2'-O-methylguanosine-3'-phosphate
  modified_base 19: mod_base = OTHER; note = 2'-O-methyluridine-3'-phosphate
  modified_base 20: mod_base = OTHER; note = 2'-O-methylcytidine-3'-phosphate
  modified_base 21: mod_base = OTHER; note = 2'-O-methyluridine-3'-phosphate ((2S,4R)-1-[29-[[2-(acetylamino)-2-deoxy-beta-D-galactopyra nosyl]oxy]-14,14-bis[[3-[[3-[[5-[[2-(acetylamino)-2-deoxy-b eta-D-galactopyranosyl]oxy]-1-oxopentyl]amino]propyl]amino] -3-oxopropoxy]methyl]-1,12,19,25-tetraoxo-16-oxa-13,20,24-t riazanonacos-1-yl]-4-hydroxy-2-pyrrolidinyl)methyl ester
tgcggaagaacgctcaagtct

SEQ ID NO: 1756 - RNA, 21 nt, synthetic construct
  source 1..21: mol_type = other RNA
  modified_base 1: mod_base = OTHER; note = 2'-O-methyladenosine-3'-phosphorothioate
  modified_base 2: mod_base = OTHER; note = 2'-O-methyladenosine-3'-phosphorothioate
  modified_base 3: mod_base = OTHER; note = 2'-O-methylguanosine-3'-phosphate
  modified_base 4: mod_base = OTHER; note = 2'-O-methyladenosine-3'-phosphate
  modified_base 5: mod_base = OTHER; note = 2'-O-methyladenosine-3'-phosphate
  modified_base 6: mod_base = OTHER; note = 2'-O-methylcytidine-3'-phosphate
  modified_base 7: mod_base = OTHER; note = 2'-deoxy-2'-fluoroguanosine-3'-phosphate
  modified_base 8: mod_base = OTHER; note = 2'-O-methylcytidine-3'-phosphate
  modified_base 9: mod_base = OTHER; note = 2'-deoxy-2'-fluorouridine-3'-phosphate
  modified_base 10: mod_base = OTHER; note = 2'-deoxy-2'-fluorocytidine-3'-phosphate
  modified_base 11: mod_base = OTHER; note = 2'-deoxy-2'-fluoroadenosine-3'-phosphate
  modified_base 12: mod_base = OTHER; note = 2'-O-methyladenosine-3'-phosphate
  modified_base 13: mod_base = OTHER; note = 2'-O-methylguanosine-3'-phosphate
  modified_base 14: mod_base = OTHER; note = 2'-O-methyluridine-3'-phosphate
  modified_base 15: mod_base = OTHER; note = 2'-O-methylcytidine-3'-phosphate
  modified_base 16: mod_base = OTHER; note = 2'-O-methyladenosine-3'-phosphate
  modified_base 17: mod_base = OTHER; note = 2'-O-methylguanosine-3'-phosphate
  modified_base 18: mod_base = OTHER; note = 2'-O-methyladenosine-3'-phosphate
  modified_base 19: mod_base = OTHER; note = 2'-O-methyladenosine-3'-phosphate
  modified_base 20: mod_base = OTHER; note = 2'-O-methyladenosine-3'-phosphate
  modified_base 21: mod_base = OTHER; note = 2'-O-methyluridine-3'-phosphate ((2S,4R)-1-[29-[[2-(acetylamino)-2-deoxy-beta-D-galactopyra nosyl]oxy]-14,14-bis[[3-[[3-[[5-[[2-(acetylamino)-2-deoxy-b eta-D-galactopyranosyl]oxy]-1-oxopentyl]amino]propyl]amino] -3-oxopropoxy]methyl]-1,12,19,25-tetraoxo-16-oxa-13,20,24-t riazanonacos-1-yl]-4-hydroxy-2-pyrrolidinyl)methyl ester
aagaacgctcaagtcagaaat

SEQ ID NO: 1757 - RNA, 21 nt, synthetic construct
  source 1..21: mol_type = other RNA
  modified_base 1: mod_base = OTHER; note = 2'-O-methylcytidine-3'-phosphorothioate
  modified_base 2: mod_base = OTHER; note = 2'-O-methylguanosine-3'-phosphorothioate
  modified_base 3: mod_base = OTHER; note = 2'-O-methylcytidine-3'-phosphate
  modified_base 4: mod_base = OTHER; note = 2'-O-methyluridine-3'-phosphate
  modified_base 5: mod_base = OTHER; note = 2'-O-methylcytidine-3'-phosphate
  modified_base 6: mod_base = OTHER; note = 2'-O-methyladenosine-3'-phosphate
  modified_base 7: mod_base = OTHER; note = 2'-deoxy-2'-fluoroadenosine-3'-phosphate
  modified_base 8: mod_base = OTHER; note = 2'-O-methylguanosine-3'-phosphate
  modified_base 9: mod_base = OTHER; note = 2'-deoxy-2'-fluorouridine-3'-phosphate
  modified_base 10: mod_base = OTHER; note = 2'-deoxy-2'-fluorocytidine-3'-phosphate
  modified_base 11: mod_base = OTHER; note = 2'-deoxy-2'-fluoroadenosine-3'-phosphate
  modified_base 12: mod_base = OTHER; note = 2'-O-methylguanosine-3'-phosphate
  modified_base 13: mod_base = OTHER; note = 2'-O-methyladenosine-3'-phosphate
  modified_base 14: mod_base = OTHER; note = 2'-O-methyladenosine-3'-phosphate
  modified_base 15: mod_base = OTHER; note = 2'-O-methyladenosine-3'-phosphate
  modified_base 16: mod_base = OTHER; note = 2'-O-methylguanosine-3'-phosphate
  modified_base 17: mod_base = OTHER; note = 2'-O-methyluridine-3'-phosphate
  modified_base 18: mod_base = OTHER; note = 2'-O-methylguanosine-3'-phosphate
  modified_base 19: mod_base = OTHER; note = 2'-O-methylcytidine-3'-phosphate
  modified_base 20: mod_base = OTHER; note = 2'-O-methylcytidine-3'-phosphate
  modified_base 21: mod_base = OTHER; note = 2'-O-methyluridine-3'-phosphate ((2S,4R)-1-[29-[[2-(acetylamino)-2-deoxy-beta-D-galactopyra nosyl]oxy]-14,14-bis[[3-[[3-[[5-[[2-(acetylamino)-2-deoxy-b eta-D-galactopyranosyl]oxy]-1-oxopentyl]amino]propyl]amino] -3-oxopropoxy]methyl]-1,12,19,25-tetraoxo-16-oxa-13,20,24-t riazanonacos-1-yl]-4-hydroxy-2-pyrrolidinyl)methyl ester
cgctcaagtcagaaagtgcct

SEQ ID NO: 1758 - RNA, 21 nt, synthetic construct
  source 1..21: mol_type = other RNA
  modified_base 1: mod_base = OTHER; note = 2'-O-methylguanosine-3'-phosphorothioate
  modified_base 2: mod_base = OTHER; note = 2'-O-methyluridine-3'-phosphorothioate
  modified_base 3: mod_base = OTHER; note = 2'-O-methyladenosine-3'-phosphate
  modified_base 4: mod_base = OTHER; note = 2'-O-methyladenosine-3'-phosphate
  modified_base 5: mod_base = OTHER; note = 2'-O-methyluridine-3'-phosphate
  modified_base 6: mod_base = OTHER; note = 2'-O-methylcytidine-3'-phosphate
  modified_base 7: mod_base = OTHER; note = 2'-deoxy-2'-fluoroadenosine-3'-phosphate
  modified_base 8: mod_base = OTHER; note = 2'-O-methylcytidine-3'-phosphate
  modified_base 9: mod_base = OTHER; note = 2'-deoxy-2'-fluoroadenosine-3'-phosphate
  modified_base 10: mod_base = OTHER; note = 2'-deoxy-2'-fluoroguanosine-3'-phosphate
  modified_base 11: mod_base = OTHER; note = 2'-deoxy-2'-fluorouridine-3'-phosphate
  modified_base 12: mod_base = OTHER; note = 2'-O-methylcytidine-3'-phosphate
  modified_base 13: mod_base = OTHER; note = 2'-O-methylguanosine-3'-phosphate
  modified_base 14: mod_base = OTHER; note = 2'-O-methyladenosine-3'-phosphate
  modified_base 15: mod_base = OTHER; note = 2'-O-methyluridine-3'-phosphate
  modified_base 16: mod_base = OTHER; note = 2'-O-methylguanosine-3'-phosphate
  modified_base 17: mod_base = OTHER; note = 2'-O-methylcytidine-3'-phosphate
  modified_base 18: mod_base = OTHER; note = 2'-O-methyluridine-3'-phosphate
  modified_base 19: mod_base = OTHER; note = 2'-O-methyluridine-3'-phosphate
  modified_base 20: mod_base = OTHER; note = 2'-O-methylcytidine-3'-phosphate
  modified_base 21: mod_base = OTHER; note = 2'-O-methyluridine-3'-phosphate ((2S,4R)-1-[29-[[2-(acetylamino)-2-deoxy-beta-D-galactopyra nosyl]oxy]-14,14-bis[[3-[[3-[[5-[[2-(acetylamino)-2-deoxy-b eta-D-galactopyranosyl]oxy]-1-oxopentyl]amino]propyl]amino] -3-oxopropoxy]methyl]-1,12,19,25-tetraoxo-16-oxa-13,20,24-t riazanonacos-1-yl]-4-hydroxy-2-pyrrolidinyl)methyl ester
gtaatcacagtcgatgcttct

SEQ ID NO: 1759 - RNA, 21 nt, synthetic construct
  source 1..21: mol_type = other RNA
  modified_base 1: mod_base = OTHER; note = 2'-O-methyladenosine-3'-phosphorothioate
  modified_base 2: mod_base = OTHER; note = 2'-O-methylguanosine-3'-phosphorothioate
  modified_base 3: mod_base = OTHER; note = 2'-O-methyluridine-3'-phosphate
  modified_base 4: mod_base = OTHER; note = 2'-O-methylcytidine-3'-phosphate
  modified_base 5: mod_base = OTHER; note = 2'-O-methylguanosine-3'-phosphate
  modified_base 6: mod_base = OTHER; note = 2'-O-methyladenosine-3'-phosphate
  modified_base 7: mod_base = OTHER; note = 2'-deoxy-2'-fluorouridine-3'-phosphate
  modified_base 8: mod_base = OTHER; note = 2'-O-methylguanosine-3'-phosphate
  modified_base 9: mod_base = OTHER; note = 2'-deoxy-2'-fluorocytidine-3'-phosphate
  modified_base 10: mod_base = OTHER; note = 2'-deoxy-2'-fluorouridine-3'-phosphate
  modified_base 11: mod_base = OTHER; note = 2'-deoxy-2'-fluorouridine-3'-phosphate
  modified_base 12: mod_base = OTHER; note = 2'-O-methylcytidine-3'-phosphate
  modified_base 13: mod_base = OTHER; note = 2'-O-methylcytidine-3'-phosphate
  modified_base 14: mod_base = OTHER; note = 2'-O-methyladenosine-3'-phosphate
  modified_base 15: mod_base = OTHER; note = 2'-O-methylguanosine-3'-phosphate
  modified_base 16: mod_base = OTHER; note = 2'-O-methyladenosine-3'-phosphate
  modified_base 17: mod_base = OTHER; note = 2'-O-methylcytidine-3'-phosphate
  modified_base 18: mod_base = OTHER; note = 2'-O-methylcytidine-3'-phosphate
  modified_base 19: mod_base = OTHER; note = 2'-O-methyladenosine-3'-phosphate
  modified_base 20: mod_base = OTHER; note = 2'-O-methylcytidine-3'-phosphate
  modified_base 21: mod_base = OTHER; note = 2'-O-methyluridine-3'-phosphate ((2S,4R)-1-[29-[[2-(acetylamino)-2-deoxy-beta-D-galactopyra nosyl]oxy]-14,14-bis[[3-[[3-[[5-[[2-(acetylamino)-2-deoxy-b eta-D-galactopyranosyl]oxy]-1-oxopentyl]amino]propyl]amino] -3-oxopropoxy]methyl]-1,12,19,25-tetraoxo-16-oxa-13,20,24-t riazanonacos-1-yl]-4-hydroxy-2-pyrrolidinyl)methyl ester
agtcgatgcttccagaccact

SEQ ID NO: 1760 - RNA, 21 nt, synthetic construct
  source 1..21: mol_type = other RNA
  modified_base 1: mod_base = OTHER; note = 2'-O-methylguanosine-3'-phosphorothioate
  modified_base 2: mod_base = OTHER; note = 2'-O-methylcytidine-3'-phosphorothioate
  modified_base 3: mod_base = OTHER; note = 2'-O-methyluridine-3'-phosphate
  modified_base 4: mod_base = OTHER; note = 2'-O-methyluridine-3'-phosphate
  modified_base 5: mod_base = OTHER; note = 2'-O-methylcytidine-3'-phosphate
  modified_base 6: mod_base = OTHER; note = 2'-O-methylcytidine-3'-phosphate
  modified_base 7: mod_base = OTHER; note = 2'-deoxy-2'-fluoroadenosine-3'-phosphate
  modified_base 8: mod_base = OTHER; note = 2'-O-methylguanosine-3'-phosphate
  modified_base 9: mod_base = OTHER; note = 2'-deoxy-2'-fluoroadenosine-3'-phosphate
  modified_base 10: mod_base = OTHER; note = 2'-deoxy-2'-fluorocytidine-3'-phosphate
  modified_base 11: mod_base = OTHER; note = 2'-deoxy-2'-fluorocytidine-3'-phosphate
  modified_base 12: mod_base = OTHER; note = 2'-O-methyladenosine-3'-phosphate
  modified_base 13: mod_base = OTHER; note = 2'-O-methylcytidine-3'-phosphate
  modified_base 14: mod_base = OTHER; note = 2'-O-methyladenosine-3'-phosphate
  modified_base 15: mod_base = OTHER; note = 2'-O-methylguanosine-3'-phosphate
  modified_base 16: mod_base = OTHER; note = 2'-O-methylcytidine-3'-phosphate
  modified_base 17: mod_base = OTHER; note = 2'-O-methylcytidine-3'-phosphate
  modified_base 18: mod_base = OTHER; note = 2'-O-methyluridine-3'-phosphate
  modified_base 19: mod_base = OTHER; note = 2'-O-methyluridine-3'-phosphate
  modified_base 20: mod_base = OTHER; note = 2'-O-methyluridine-3'-phosphate
  modified_base 21: mod_base = OTHER; note = 2'-O-methyluridine-3'-phosphate ((2S,4R)-1-[29-[[2-(acetylamino)-2-deoxy-beta-D-galactopyra nosyl]oxy]-14,14-bis[[3-[[3-[[5-[[2-(acetylamino)-2-deoxy-b eta-D-galactopyranosyl]oxy]-1-oxopentyl]amino]propyl]amino] -3-oxopropoxy]methyl]-1,12,19,25-tetraoxo-16-oxa-13,20,24-t riazanonacos-1-yl]-4-hydroxy-2-pyrrolidinyl)methyl ester
gcttccagaccacagcctttt

SEQ ID NO: 1761 - RNA, 21 nt, synthetic construct
  source 1..21: mol_type = other RNA
  modified_base 1: mod_base = OTHER; note = 2'-O-methylcytidine-3'-phosphorothioate
  modified_base 2: mod_base = OTHER; note = 2'-O-methyladenosine-3'-phosphorothioate
  modified_base 3: mod_base = OTHER; note = 2'-O-methylguanosine-3'-phosphate
  modified_base 4: mod_base = OTHER; note = 2'-O-methyladenosine-3'-phosphate
  modified_base 5: mod_base = OTHER; note = 2'-O-methylcytidine-3'-phosphate
  modified_base 6: mod_base = OTHER; note = 2'-O-methylcytidine-3'-phosphate
  modified_base 7: mod_base = OTHER; note = 2'-deoxy-2'-fluoroadenosine-3'-phosphate
  modified_base 8: mod_base = OTHER; note = 2'-O-methylcytidine-3'-phosphate
  modified_base 9: mod_base = OTHER; note = 2'-deoxy-2'-fluoroadenosine-3'-phosphate
  modified_base 10: mod_base = OTHER; note = 2'-deoxy-2'-fluoroguanosine-3'-phosphate
  modified_base 11: mod_base = OTHER; note = 2'-deoxy-2'-fluorocytidine-3'-phosphate
  modified_base 12: mod_base = OTHER; note = 2'-O-methylcytidine-3'-phosphate
  modified_base 13: mod_base = OTHER; note = 2'-O-methyluridine-3'-phosphate
  modified_base 14: mod_base = OTHER; note = 2'-O-methyluridine-3'-phosphate
  modified_base 15: mod_base = OTHER; note = 2'-O-methyluridine-3'-phosphate
  modified_base 16: mod_base = OTHER; note = 2'-O-methylcytidine-3'-phosphate
  modified_base 17: mod_base = OTHER; note = 2'-O-methyladenosine-3'-phosphate
  modified_base 18: mod_base = OTHER; note = 2'-O-methyluridine-3'-phosphate
  modified_base 19: mod_base = OTHER; note = 2'-O-methylguanosine-3'-phosphate
  modified_base 20: mod_base = OTHER; note = 2'-O-methylguanosine-3'-phosphate
  modified_base 21: mod_base = OTHER; note = 2'-O-methyluridine-3'-phosphate ((2S,4R)-1-[29-[[2-(acetylamino)-2-deoxy-beta-D-galactopyra nosyl]oxy]-14,14-bis[[3-[[3-[[5-[[2-(acetylamino)-2-deoxy-b eta-D-galactopyranosyl]oxy]-1-oxopentyl]amino]propyl]amino] -3-oxopropoxy]methyl]-1,12,19,25-tetraoxo-16-oxa-13,20,24-t riazanonacos-1-yl]-4-hydroxy-2-pyrrolidinyl)methyl ester
cagaccacagcctttcatggt

SEQ ID NO: 1762 - RNA, 21 nt, synthetic construct
  source 1..21: mol_type = other RNA
  modified_base 1: mod_base = OTHER; note = 2'-O-methylguanosine-3'-phosphorothioate
  modified_base 2: mod_base = OTHER; note = 2'-O-methyluridine-3'-phosphorothioate
  modified_base 3: mod_base = OTHER; note = 2'-O-methylguanosine-3'-phosphate
  modified_base 4: mod_base = OTHER; note = 2'-O-methylguanosine-3'-phosphate
  modified_base 5: mod_base = OTHER; note = 2'-O-methyladenosine-3'-phosphate
  modified_base 6: mod_base = OTHER; note = 2'-O-methylguanosine-3'-phosphate
  modified_base 7: mod_base = OTHER; note = 2'-deoxy-2'-fluoroadenosine-3'-phosphate
  modified_base 8: mod_base = OTHER; note = 2'-O-methyluridine-3'-phosphate
  modified_base 9: mod_base = OTHER; note = 2'-deoxy-2'-fluorocytidine-3'-phosphate
  modified_base 10: mod_base = OTHER; note = 2'-deoxy-2'-fluorocytidine-3'-phosphate
  modified_base 11: mod_base = OTHER; note = 2'-deoxy-2'-fluorocytidine-3'-phosphate
  modified_base 12: mod_base = OTHER; note = 2'-O-methyladenosine-3'-phosphate
  modified_base 13: mod_base = OTHER; note = 2'-O-methyluridine-3'-phosphate
  modified_base 14: mod_base = OTHER; note = 2'-O-methylcytidine-3'-phosphate
  modified_base 15: mod_base = OTHER; note = 2'-O-methylcytidine-3'-phosphate
  modified_base 16: mod_base = OTHER; note = 2'-O-methyladenosine-3'-phosphate
  modified_base 17: mod_base = OTHER; note = 2'-O-methylguanosine-3'-phosphate
  modified_base 18: mod_base = OTHER; note = 2'-O-methyluridine-3'-phosphate
  modified_base 19: mod_base = OTHER; note = 2'-O-methylguanosine-3'-phosphate
  modified_base 20: mod_base = OTHER; note = 2'-O-methyluridine-3'-phosphate
  modified_base 21: mod_base = OTHER; note = 2'-O-methyluridine-3'-phosphate ((2S,4R)-1-[29-[[2-(acetylamino)-2-deoxy-beta-D-galactopyra nosyl]oxy]-14,14-bis[[3-[[3-[[5-[[2-(acetylamino)-2-deoxy-b eta-D-galactopyranosyl]oxy]-1-oxopentyl]amino]propyl]amino] -3-oxopropoxy]methyl]-1,12,19,25-tetraoxo-16-oxa-13,20,24-t riazanonacos-1-yl]-4-hydroxy-2-pyrrolidinyl)methyl ester
gtggagatcccatccagtgtt

SEQ ID NO: 1763 - RNA, 21 nt, synthetic construct
  source 1..21: mol_type = other RNA
  modified_base 1: mod_base = OTHER; note = 2'-O-methylguanosine-3'-phosphorothioate
  modified_base 2: mod_base = OTHER; note = 2'-O-methyladenosine-3'-phosphorothioate
  modified_base 3: mod_base = OTHER; note = 2'-O-methyluridine-3'-phosphate
  modified_base 4: mod_base = OTHER; note = 2'-O-methylcytidine-3'-phosphate
  modified_base 5: mod_base = OTHER; note = 2'-O-methylcytidine-3'-phosphate
  modified_base 6: mod_base = OTHER; note = 2'-O-methylcytidine-3'-phosphate
  modified_base 7: mod_base = OTHER; note = 2'-deoxy-2'-fluoroadenosine-3'-phosphate
  modified_base 8: mod_base = OTHER; note = 2'-O-methyluridine-3'-phosphate
  modified_base 9: mod_base = OTHER; note = 2'-deoxy-2'-fluorocytidine-3'-phosphate
  modified_base 10: mod_base = OTHER; note = 2'-deoxy-2'-fluorocytidine-3'-phosphate
  modified_base 11: mod_base = OTHER; note = 2'-deoxy-2'-fluoroadenosine-3'-phosphate
  modified_base 12: mod_base = OTHER; note = 2'-O-methylguanosine-3'-phosphate
  modified_base 13: mod_base = OTHER; note = 2'-O-methyluridine-3'-phosphate
  modified_base 14: mod_base = OTHER; note = 2'-O-methylguanosine-3'-phosphate
  modified_base 15: mod_base = OTHER; note = 2'-O-methyluridine-3'-phosphate
  modified_base 16: mod_base = OTHER; note = 2'-O-methylguanosine-3'-phosphate
  modified_base 17: mod_base = OTHER; note = 2'-O-methylcytidine-3'-phosphate
  modified_base 18: mod_base = OTHER; note = 2'-O-methylcytidine-3'-phosphate
  modified_base 19: mod_base = OTHER; note = 2'-O-methyladenosine-3'-phosphate
  modified_base 20: mod_base = OTHER; note = 2'-O-methyluridine-3'-phosphate
  modified_base 21: mod_base = OTHER; note = 2'-O-methyluridine-3'-phosphate ((2S,4R)-1-[29-[[2-(acetylamino)-2-deoxy-beta-D-galactopyra nosyl]oxy]-14,14-bis[[3-[[3-[[5-[[2-(acetylamino)-2-deoxy-b eta-D-galactopyranosyl]oxy]-1-oxopentyl]amino]propyl]amino] -3-oxopropoxy]methyl]-1,12,19,25-tetraoxo-16-oxa-13,20,24-t riazanonacos-1-yl]-4-hydroxy-2-pyrrolidinyl)methyl ester
gatcccatccagtgtgccatt

SEQ ID NO: 1764 - RNA, 21 nt, synthetic construct
  source 1..21: mol_type = other RNA
  modified_base 1: mod_base = OTHER; note = 2'-O-methyluridine-3'-phosphorothioate
  modified_base 2: mod_base = OTHER; note = 2'-O-methylguanosine-3'-phosphorothioate
  modified_base 3: mod_base = OTHER; note = 2'-O-methylcytidine-3'-phosphate
  modified_base 4: mod_base = OTHER; note = 2'-O-methylcytidine-3'-phosphate
  modified_base 5: mod_base = OTHER; note = 2'-O-methylguanosine-3'-phosphate
  modified_base 6: mod_base = OTHER; note = 2'-O-methylguanosine-3'-phosphate
  modified_base 7: mod_base = OTHER; note = 2'-deoxy-2'-fluorocytidine-3'-phosphate
  modified_base 8: mod_base = OTHER; note = 2'-O-methyluridine-3'-phosphate
  modified_base 9: mod_base = OTHER; note = 2'-deoxy-2'-fluorocytidine-3'-phosphate
  modified_base 10: mod_base = OTHER; note = 2'-deoxy-2'-fluorouridine-3'-phosphate
  modified_base 11: mod_base = OTHER; note = 2'-deoxy-2'-fluoroguanosine-3'-phosphate
  modified_base 12: mod_base = OTHER; note = 2'-O-methyluridine-3'-phosphate
  modified_base 13: mod_base = OTHER; note = 2'-O-methyladenosine-3'-phosphate
  modified_base 14: mod_base = OTHER; note = 2'-O-methyluridine-3'-phosphate
  modified_base 15: mod_base = OTHER; note = 2'-O-methyladenosine-3'-phosphate
  modified_base 16: mod_base = OTHER; note = 2'-O-methylguanosine-3'-phosphate
  modified_base 17: mod_base = OTHER; note = 2'-O-methylguanosine-3'-phosphate
  modified_base 18: mod_base = OTHER; note = 2'-O-methyladenosine-3'-phosphate
  modified_base 19: mod_base = OTHER; note = 2'-O-methyladenosine-3'-phosphate
  modified_base 20: mod_base = OTHER; note = 2'-O-methylcytidine-3'-phosphate
  modified_base 21: mod_base = OTHER; note = 2'-O-methyluridine-3'-phosphate ((2S,4R)-1-[29-[[2-(acetylamino)-2-deoxy-beta-D-galactopyra nosyl]oxy]-14,14-bis[[3-[[3-[[5-[[2-(acetylamino)-2-deoxy-b eta-D-galactopyranosyl]oxy]-1-oxopentyl]amino]propyl]amino] -3-oxopropoxy]methyl]-1,12,19,25-tetraoxo-16-oxa-13,20,24-t riazanonacos-1-yl]-4-hydroxy-2-pyrrolidinyl)methyl ester
tgccggctctgtataggaact

SEQ ID NO: 1765 - RNA, 21 nt, synthetic construct
  source 1..21: mol_type = other RNA
  modified_base 1: mod_base = OTHER; note = 2'-O-methylguanosine-3'-phosphorothioate
  modified_base 2: mod_base = OTHER; note = 2'-O-methylcytidine-3'-phosphorothioate
  modified_base 3: mod_base = OTHER; note = 2'-O-methyluridine-3'-phosphate
  modified_base 4: mod_base = OTHER; note = 2'-O-methylcytidine-3'-phosphate
  modified_base 5: mod_base = OTHER; note = 2'-O-methyluridine-3'-phosphate
  modified_base 6: mod_base = OTHER; note = 2'-O-methylguanosine-3'-phosphate
  modified_base 7: mod_base = OTHER; note = 2'-deoxy-2'-fluorouridine-3'-phosphate
  modified_base 8: mod_base = OTHER; note = 2'-O-methyladenosine-3'-phosphate
  modified_base 9: mod_base = OTHER; note = 2'-deoxy-2'-fluorouridine-3'-phosphate
  modified_base 10: mod_base = OTHER; note = 2'-deoxy-2'-fluoroadenosine-3'-phosphate
  modified_base 11: mod_base = OTHER; note = 2'-deoxy-2'-fluoroguanosine-3'-phosphate
  modified_base 12: mod_base = OTHER; note = 2'-O-methylguanosine-3'-phosphate
  modified_base 13: mod_base = OTHER; note = 2'-O-methyladenosine-3'-phosphate
  modified_base 14: mod_base = OTHER; note = 2'-O-methyladenosine-3'-phosphate
  modified_base 15: mod_base = OTHER; note = 2'-O-methylcytidine-3'-phosphate
  modified_base 16: mod_base = OTHER; note = 2'-O-methylcytidine-3'-phosphate
  modified_base 17: mod_base = OTHER; note = 2'-O-methyladenosine-3'-phosphate
  modified_base 18: mod_base = OTHER; note = 2'-O-methylguanosine-3'-phosphate
  modified_base 19: mod_base = OTHER; note = 2'-O-methyladenosine-3'-phosphate
  modified_base 20: mod_base = OTHER; note = 2'-O-methyladenosine-3'-phosphate
  modified_base 21: mod_base = OTHER; note = 2'-O-methyluridine-3'-phosphate ((2S,4R)-1-[29-[[2-(acetylamino)-2-deoxy-beta-D-galactopyra nosyl]oxy]-14,14-bis[[3-[[3-[[5-[[2-(acetylamino)-2-deoxy-b eta-D-galactopyranosyl]oxy]-1-oxopentyl]amino]propyl]amino] -3-oxopropoxy]methyl]-1,12,19,25-tetraoxo-16-oxa-13,20,24-t riazanonacos-1-yl]-4-hydroxy-2-pyrrolidinyl)methyl ester
gctctgtataggaaccagaat

SEQ ID NO: 1766 - RNA, 21 nt, synthetic construct
  source 1..21: mol_type = other RNA
  modified_base 1: mod_base = OTHER; note = 2'-O-methylguanosine-3'-phosphorothioate
  modified_base 2: mod_base = OTHER; note = 2'-O-methyluridine-3'-phosphorothioate
  modified_base 3: mod_base = OTHER; note = 2'-O-methyladenosine-3'-phosphate
  modified_base 4: mod_base = OTHER; note = 2'-O-methyluridine-3'-phosphate
  modified_base 5: mod_base = OTHER; note = 2'-O-methyladenosine-3'-phosphate
  modified_base 6: mod_base = OTHER; note = 2'-O-methylguanosine-3'-phosphate
  modified_base 7: mod_base = OTHER; note = 2'-deoxy-2'-fluoroguanosine-3'-phosphate
  modified_base 8: mod_base = OTHER; note = 2'-O-methyladenosine-3'-phosphate
  modified_base 9: mod_base = OTHER; note = 2'-deoxy-2'-fluoroadenosine-3'-phosphate
  modified_base 10: mod_base = OTHER; note = 2'-deoxy-2'-fluorocytidine-3'-phosphate
  modified_base 11: mod_base = OTHER; note = 2'-deoxy-2'-fluorocytidine-3'-phosphate
  modified_base 12: mod_base = OTHER; note = 2'-O-methyladenosine-3'-phosphate
  modified_base 13: mod_base = OTHER; note = 2'-O-methylguanosine-3'-phosphate
  modified_base 14: mod_base = OTHER; note = 2'-O-methyladenosine-3'-phosphate
  modified_base 15: mod_base = OTHER; note = 2'-O-methyladenosine-3'-phosphate
  modified_base 16: mod_base = OTHER; note = 2'-O-methyluridine-3'-phosphate
  modified_base 17: mod_base = OTHER; note = 2'-O-methyluridine-3'-phosphate
  modified_base 18: mod_base = OTHER; note = 2'-O-methyladenosine-3'-phosphate
  modified_base 19: mod_base = OTHER; note = 2'-O-methylcytidine-3'-phosphate
  modified_base 20: mod_base = OTHER; note = 2'-O-methyladenosine-3'-phosphate
  modified_base 21: mod_base = OTHER; note = 2'-O-methyluridine-3'-phosphate ((2S,4R)-1-[29-[[2-(acetylamino)-2-deoxy-beta-D-galactopyra nosyl]oxy]-14,14-bis[[3-[[3-[[5-[[2-(acetylamino)-2-deoxy-b eta-D-galactopyranosyl]oxy]-1-oxopentyl]amino]propyl]amino] -3-oxopropoxy]methyl]-1,12,19,25-tetraoxo-16-oxa-13,20,24-t riazanonacos-1-yl]-4-hydroxy-2-pyrrolidinyl)methyl ester
gtataggaaccagaattacat

SEQ ID NO: 1767 - RNA, 21 nt, synthetic construct
  source 1..21: mol_type = other RNA
  modified_base 1: mod_base = OTHER; note = 2'-O-methylguanosine-3'-phosphorothioate
  modified_base 2: mod_base = OTHER; note = 2'-O-methyladenosine-3'-phosphorothioate
  modified_base 3: mod_base = OTHER; note = 2'-O-methyladenosine-3'-phosphate
  modified_base 4: mod_base = OTHER; note = 2'-O-methylcytidine-3'-phosphate
  modified_base 5: mod_base = OTHER; note = 2'-O-methylcytidine-3'-phosphate
  modified_base 6: mod_base = OTHER; note = 2'-O-methyladenosine-3'-phosphate
  modified_base 7: mod_base = OTHER; note = 2'-deoxy-2'-fluoroguanosine-3'-phosphate
  modified_base 8: mod_base = OTHER; note = 2'-O-methyladenosine-3'-phosphate
  modified_base 9: mod_base = OTHER; note = 2'-deoxy-2'-fluoroadenosine-3'-phosphate
  modified_base 10: mod_base = OTHER; note = 2'-deoxy-2'-fluorouridine-3'-phosphate
  modified_base 11: mod_base = OTHER; note = 2'-deoxy-2'-fluorouridine-3'-phosphate
  modified_base 12: mod_base = OTHER; note = 2'-O-methyladenosine-3'-phosphate
  modified_base 13: mod_base = OTHER; note = 2'-O-methylcytidine-3'-phosphate
  modified_base 14: mod_base = OTHER; note = 2'-O-methyladenosine-3'-phosphate
  modified_base 15: mod_base = OTHER; note = 2'-O-methyladenosine-3'-phosphate
  modified_base 16: mod_base = OTHER; note = 2'-O-methylcytidine-3'-phosphate
  modified_base 17: mod_base = OTHER; note = 2'-O-methyladenosine-3'-phosphate
  modified_base 18: mod_base = OTHER; note = 2'-O-methyladenosine-3'-phosphate
  modified_base 19: mod_base = OTHER; note = 2'-O-methyladenosine-3'-phosphate
  modified_base 20: mod_base = OTHER; note = 2'-O-methylcytidine-3'-phosphate
  modified_base 21: mod_base = OTHER; note = 2'-O-methyluridine-3'-phosphate ((2S,4R)-1-[29-[[2-(acetylamino)-2-deoxy-beta-D-galactopyra nosyl]oxy]-14,14-bis[[3-[[3-[[5-[[2-(acetylamino)-2-deoxy-b eta-D-galactopyranosyl]oxy]-1-oxopentyl]amino]propyl]amino] -3-oxopropoxy]methyl]-1,12,19,25-tetraoxo-16-oxa-13,20,24-t riazanonacos-1-yl]-4-hydroxy-2-pyrrolidinyl)methyl ester
gaaccagaattacaacaaact

SEQ ID NO: 1768 - RNA, 21 nt, synthetic construct
  source 1..21: mol_type = other RNA
  modified_base 1: mod_base = OTHER; note = 2'-O-methyladenosine-3'-phosphorothioate
  modified_base 2: mod_base = OTHER; note = 2'-O-methyladenosine-3'-phosphorothioate
  modified_base 3: mod_base = OTHER; note = 2'-O-methyluridine-3'-phosphate
  modified_base 4: mod_base = OTHER; note = 2'-O-methyluridine-3'-phosphate
  modified_base 5: mod_base = OTHER; note = 2'-O-methyladenosine-3'-phosphate
  modified_base 6: mod_base = OTHER; note = 2'-O-methylcytidine-3'-phosphate
  modified_base 7: mod_base = OTHER; note = 2'-deoxy-2'-fluoroadenosine-3'-phosphate
  modified_base 8: mod_base = OTHER; note = 2'-O-methyladenosine-3'-phosphate
  modified_base 9: mod_base = OTHER; note = 2'-deoxy-2'-fluorocytidine-3'-phosphate
  modified_base 10: mod_base = OTHER; note = 2'-deoxy-2'-fluoroadenosine-3'-phosphate
  modified_base 11: mod_base = OTHER; note = 2'-deoxy-2'-fluoroadenosine-3'-phosphate
  modified_base 12: mod_base = OTHER; note = 2'-O-methyladenosine-3'-phosphate
  modified_base 13: mod_base = OTHER; note = 2'-O-methylcytidine-3'-phosphate
  modified_base 14: mod_base = OTHER; note = 2'-O-methyluridine-3'-phosphate
  modified_base 15: mod_base = OTHER; note = 2'-O-methylguanosine-3'-phosphate
  modified_base 16: mod_base = OTHER; note = 2'-O-methylcytidine-3'-phosphate
  modified_base 17: mod_base = OTHER; note = 2'-O-methyladenosine-3'-phosphate
  modified_base 18: mod_base = OTHER; note = 2'-O-methylguanosine-3'-phosphate
  modified_base 19: mod_base = OTHER; note = 2'-O-methylcytidine-3'-phosphate
  modified_base 20: mod_base = OTHER; note = 2'-O-methyladenosine-3'-phosphate
  modified_base 21: mod_base = OTHER; note = 2'-O-methyluridine-3'-phosphate ((2S,4R)-1-[29-[[2-(acetylamino)-2-deoxy-beta-D-galactopyra nosyl]oxy]-14,14-bis[[3-[[3-[[5-[[2-(acetylamino)-2-deoxy-b eta-D-galactopyranosyl]oxy]-1-oxopentyl]amino]propyl]amino] -3-oxopropoxy]methyl]-1,12,19,25-tetraoxo-16-oxa-13,20,24-t riazanonacos-1-yl]-4-hydroxy-2-pyrrolidinyl)methyl ester
aattacaacaaactgcagcat

SEQ ID NO: 1769 - RNA, 21 nt, synthetic construct
  source 1..21: mol_type = other RNA
  modified_base 1: mod_base = OTHER; note = 2'-O-methyladenosine-3'-phosphorothioate
  modified_base 2: mod_base = OTHER; note = 2'-O-methyladenosine-3'-phosphorothioate
  modified_base 3: mod_base = OTHER; note = 2'-O-methylcytidine-3'-phosphate
  modified_base 4: mod_base = OTHER; note = 2'-O-methyladenosine-3'-phosphate
  modified_base 5: mod_base = OTHER; note = 2'-O-methyladenosine-3'-phosphate
  modified_base 6: mod_base = OTHER; note = 2'-O-methyladenosine-3'-phosphate
  modified_base 7: mod_base = OTHER; note = 2'-deoxy-2'-fluorocytidine-3'-phosphate
  modified_base 8: mod_base = OTHER; note = 2'-O-methyluridine-3'-phosphate
  modified_base 9: mod_base = OTHER; note = 2'-deoxy-2'-fluoroguanosine-3'-phosphate
  modified_base 10: mod_base = OTHER; note = 2'-deoxy-2'-fluorocytidine-3'-phosphate
  modified_base 11: mod_base = OTHER; note = 2'-deoxy-2'-fluoroadenosine-3'-phosphate
  modified_base 12: mod_base = OTHER; note = 2'-O-methylguanosine-3'-phosphate
  modified_base 13: mod_base = OTHER; note = 2'-O-methylcytidine-3'-phosphate
  modified_base 14: mod_base = OTHER; note = 2'-O-methyladenosine-3'-phosphate
  modified_base 15: mod_base = OTHER; note = 2'-O-methylcytidine-3'-phosphate
  modified_base 16: mod_base = OTHER; note = 2'-O-methylguanosine-3'-phosphate
  modified_base 17: mod_base = OTHER; note = 2'-O-methyluridine-3'-phosphate
  modified_base 18: mod_base = OTHER; note = 2'-O-methyluridine-3'-phosphate
  modified_base 19: mod_base = OTHER; note = 2'-O-methylcytidine-3'-phosphate
  modified_base 20: mod_base = OTHER; note = 2'-O-methyladenosine-3'-phosphate
  modified_base 21: mod_base = OTHER; note = 2'-O-methyluridine-3'-phosphate ((2S,4R)-1-[29-[[2-(acetylamino)-2-deoxy-beta-D-galactopyra nosyl]oxy]-14,14-bis[[3-[[3-[[5-[[2-(acetylamino)-2-deoxy-b eta-D-galactopyranosyl]oxy]-1-oxopentyl]amino]propyl]amino] -3-oxopropoxy]methyl]-1,12,19,25-tetraoxo-16-oxa-13,20,24-t riazanonacos-1-yl]-4-hydroxy-2-pyrrolidinyl)methyl ester
aacaaactgcagcacgttcat

SEQ ID NO: 1770 - RNA, 21 nt, synthetic construct
  source 1..21: mol_type = other RNA
  modified_base 1: mod_base = OTHER; note = 2'-O-methylcytidine-3'-phosphorothioate
  modified_base 2: mod_base = OTHER; note = 2'-O-methyluridine-3'-phosphorothioate
  modified_base 3: mod_base = OTHER; note = 2'-O-methylguanosine-3'-phosphate
  modified_base 4: mod_base = OTHER; note = 2'-O-methylcytidine-3'-phosphate
  modified_base 5: mod_base = OTHER; note = 2'-O-methyladenosine-3'-phosphate
  modified_base 6: mod_base = OTHER; note = 2'-O-methylguanosine-3'-phosphate
  modified_base 7: mod_base = OTHER; note = 2'-deoxy-2'-fluorocytidine-3'-phosphate
  modified_base 8: mod_base = OTHER; note = 2'-O-methyladenosine-3'-phosphate
  modified_base 9: mod_base = OTHER; note = 2'-deoxy-2'-fluorocytidine-3'-phosphate
  modified_base 10: mod_base = OTHER; note = 2'-deoxy-2'-fluoroguanosine-3'-phosphate
  modified_base 11: mod_base = OTHER; note = 2'-deoxy-2'-fluorouridine-3'-phosphate
  modified_base 12: mod_base = OTHER; note = 2'-O-methyluridine-3'-phosphate
  modified_base 13: mod_base = OTHER; note = 2'-O-methylcytidine-3'-phosphate
  modified_base 14: mod_base = OTHER; note = 2'-O-methyladenosine-3'-phosphate
  modified_base 15: mod_base = OTHER; note = 2'-O-methylguanosine-3'-phosphate
  modified_base 16: mod_base = OTHER; note = 2'-O-methyladenosine-3'-phosphate
  modified_base 17: mod_base = OTHER; note = 2'-O-methylcytidine-3'-phosphate
  modified_base 18: mod_base = OTHER; note = 2'-O-methylcytidine-3'-phosphate
  modified_base 19: mod_base = OTHER; note = 2'-O-methylcytidine-3'-phosphate
  modified_base 20: mod_base = OTHER; note = 2'-O-methylguanosine-3'-phosphate
  modified_base 21: mod_base = OTHER; note = 2'-O-methyluridine-3'-phosphate ((2S,4R)-1-[29-[[2-(acetylamino)-2-deoxy-beta-D-galactopyra nosyl]oxy]-14,14-bis[[3-[[3-[[5-[[2-(acetylamino)-2-deoxy-b eta-D-galactopyranosyl]oxy]-1-oxopentyl]amino]propyl]amino] -3-oxopropoxy]methyl]-1,12,19,25-tetraoxo-16-oxa-13,20,24-t riazanonacos-1-yl]-4-hydroxy-2-pyrrolidinyl)methyl ester
ctgcagcacgttcagacccgt

SEQ ID NO: 1771 - RNA, 21 nt, synthetic construct
  source 1..21: mol_type = other RNA
  modified_base 1: mod_base = OTHER; note = 2'-O-methylcytidine-3'-phosphorothioate
  modified_base 2: mod_base = OTHER; note = 2'-O-methyladenosine-3'-phosphorothioate
  modified_base 3: mod_base = OTHER; note = 2'-O-methylcytidine-3'-phosphate
  modified_base 4: mod_base = OTHER; note = 2'-O-methylguanosine-3'-phosphate
  modified_base 5: mod_base = OTHER; note = 2'-O-methyluridine-3'-phosphate
  modified_base 6: mod_base = OTHER; note = 2'-O-methyluridine-3'-phosphate
  modified_base 7: mod_base = OTHER; note = 2'-deoxy-2'-fluorocytidine-3'-phosphate
  modified_base 8: mod_base = OTHER; note = 2'-O-methyladenosine-3'-phosphate
  modified_base 9: mod_base = OTHER; note = 2'-deoxy-2'-fluoroguanosine-3'-phosphate
  modified_base 10: mod_base = OTHER; note = 2'-deoxy-2'-fluoroadenosine-3'-phosphate
  modified_base 11: mod_base = OTHER; note = 2'-deoxy-2'-fluorocytidine-3'-phosphate
  modified_base 12: mod_base = OTHER; note = 2'-O-methylcytidine-3'-phosphate
  modified_base 13: mod_base = OTHER; note = 2'-O-methylcytidine-3'-phosphate
  modified_base 14: mod_base = OTHER; note = 2'-O-methylguanosine-3'-phosphate
  modified_base 15: mod_base = OTHER; note = 2'-O-methyluridine-3'-phosphate
  modified_base 16: mod_base = OTHER; note = 2'-O-methylguanosine-3'-phosphate
  modified_base 17: mod_base = OTHER; note = 2'-O-methylguanosine-3'-phosphate
  modified_base 18: mod_base = OTHER; note = 2'-O-methyladenosine-3'-phosphate
  modified_base 19: mod_base = OTHER; note = 2'-O-methyluridine-3'-phosphate
  modified_base 20: mod_base = OTHER; note = 2'-O-methyladenosine-3'-phosphate
  modified_base 21: mod_base = OTHER; note = 2'-O-methyluridine-3'-phosphate ((2S,4R)-1-[29-[[2-(acetylamino)-2-deoxy-beta-D-galactopyra nosyl]oxy]-14,14-bis[[3-[[3-[[5-[[2-(acetylamino)-2-deoxy-b eta-D-galactopyranosyl]oxy]-1-oxopentyl]amino]propyl]amino] -3-oxopropoxy]methyl]-1,12,19,25-tetraoxo-16-oxa-13,20,24-t riazanonacos-1-yl]-4-hydroxy-2-pyrrolidinyl)methyl ester
cacgttcagacccgtggatat

SEQ ID NO: 1772 - RNA, 21 nt, synthetic construct
  source 1..21: mol_type = other RNA
  modified_base 1: mod_base = OTHER; note = 2'-O-methylcytidine-3'-phosphorothioate
  modified_base 2: mod_base = OTHER; note = 2'-O-methyladenosine-3'-phosphorothioate
  modified_base 3: mod_base = OTHER; note = 2'-O-methylguanosine-3'-phosphate
  modified_base 4: mod_base = OTHER; note = 2'-O-methyladenosine-3'-phosphate
  modified_base 5: mod_base = OTHER; note = 2'-O-methylcytidine-3'-phosphate
  modified_base 6: mod_base = OTHER; note = 2'-O-methylcytidine-3'-phosphate
  modified_base 7: mod_base = OTHER; note = 2'-deoxy-2'-fluorocytidine-3'-phosphate
  modified_base 8: mod_base = OTHER; note = 2'-O-methylguanosine-3'-phosphate
  modified_base 9: mod_base = OTHER; note = 2'-deoxy-2'-fluorouridine-3'-phosphate
  modified_base 10: mod_base = OTHER; note = 2'-deoxy-2'-fluoroguanosine-3'-phosphate
  modified_base 11: mod_base = OTHER; note = 2'-deoxy-2'-fluoroguanosine-3'-phosphate
  modified_base 12: mod_base = OTHER; note = 2'-O-methyladenosine-3'-phosphate
  modified_base 13: mod_base = OTHER; note = 2'-O-methyluridine-3'-phosphate
  modified_base 14: mod_base = OTHER; note = 2'-O-methyladenosine-3'-phosphate
  modified_base 15: mod_base = OTHER; note = 2'-O-methyluridine-3'-phosphate
  modified_base 16: mod_base = OTHER; note = 2'-O-methyladenosine-3'-phosphate
  modified_base 17: mod_base = OTHER; note = 2'-O-methylcytidine-3'-phosphate
  modified_base 18: mod_base = OTHER; note = 2'-O-methylcytidine-3'-phosphate
  modified_base 19: mod_base = OTHER; note = 2'-O-methyladenosine-3'-phosphate
  modified_base 20: mod_base = OTHER; note = 2'-O-methyladenosine-3'-phosphate
  modified_base 21: mod_base = OTHER; note = 2'-O-methyluridine-3'-phosphate ((2S,4R)-1-[29-[[2-(acetylamino)-2-deoxy-beta-D-galactopyra nosyl]oxy]-14,14-bis[[3-[[3-[[5-[[2-(acetylamino)-2-deoxy-b eta-D-galactopyranosyl]oxy]-1-oxopentyl]amino]propyl]amino] -3-oxopropoxy]methyl]-1,12,19,25-tetraoxo-16-oxa-13,20,24-t riazanonacos-1-yl]-4-hydroxy-2-pyrrolidinyl)methyl ester
cagacccgtggatataccaat

SEQ ID NO: 1773 - RNA, 21 nt, synthetic construct
  source 1..21: mol_type = other RNA
  modified_base 1: mod_base = OTHER; note = 2'-O-methylcytidine-3'-phosphorothioate
  modified_base 2: mod_base = OTHER; note = 2'-O-methylcytidine-3'-phosphorothioate
  modified_base 3: mod_base = OTHER; note = 2'-O-methylguanosine-3'-phosphate
  modified_base 4: mod_base = OTHER; note = 2'-O-methyluridine-3'-phosphate
  modified_base 5: mod_base = OTHER; note = 2'-O-methylguanosine-3'-phosphate
  modified_base 6: mod_base = OTHER; note = 2'-O-methylguanosine-3'-phosphate
  modified_base 7: mod_base = OTHER; note = 2'-deoxy-2'-fluoroadenosine-3'-phosphate
  modified_base 8: mod_base = OTHER; note = 2'-O-methyluridine-3'-phosphate
  modified_base 9: mod_base = OTHER; note = 2'-deoxy-2'-fluoroadenosine-3'-phosphate
  modified_base 10: mod_base = OTHER; note = 2'-deoxy-2'-fluorouridine-3'-phosphate
  modified_base 11: mod_base = OTHER; note = 2'-deoxy-2'-fluoroadenosine-3'-phosphate
  modified_base 12: mod_base = OTHER; note = 2'-O-methylcytidine-3'-phosphate
  modified_base 13: mod_base = OTHER; note = 2'-O-methylcytidine-3'-phosphate
  modified_base 14: mod_base = OTHER; note = 2'-O-methyladenosine-3'-phosphate
  modified_base 15: mod_base = OTHER; note = 2'-O-methyladenosine-3'-phosphate
  modified_base 16: mod_base = OTHER; note = 2'-O-methylguanosine-3'-phosphate
  modified_base 17: mod_base = OTHER; note = 2'-O-methyladenosine-3'-phosphate
  modified_base 18: mod_base = OTHER; note = 2'-O-methylguanosine-3'-phosphate
  modified_base 19: mod_base = OTHER; note = 2'-O-methyluridine-3'-phosphate
  modified_base 20: mod_base = OTHER; note = 2'-O-methylcytidine-3'-phosphate
  modified_base 21: mod_base = OTHER; note = 2'-O-methyluridine-3'-phosphate ((2S,4R)-1-[29-[[2-(acetylamino)-2-deoxy-beta-D-galactopyra nosyl]oxy]-14,14-bis[[3-[[3-[[5-[[2-(acetylamino)-2-deoxy-b eta-D-galactopyranosyl]oxy]-1-oxopentyl]amino]propyl]amino] -3-oxopropoxy]methyl]-1,12,19,25-tetraoxo-16-oxa-13,20,24-t riazanonacos-1-yl]-4-hydroxy-2-pyrrolidinyl)methyl ester
ccgtggatataccaagagtct

SEQ ID NO: 1774 - RNA, 21 nt, synthetic construct
  source 1..21: mol_type = other RNA
  modified_base 1: mod_base = OTHER; note = 2'-O-methylguanosine-3'-phosphorothioate
  modified_base 2: mod_base = OTHER; note = 2'-O-methyladenosine-3'-phosphorothioate
  modified_base 3: mod_base = OTHER; note = 2'-O-methyluridine-3'-phosphate
  modified_base 4: mod_base = OTHER; note = 2'-O-methyladenosine-3'-phosphate
  modified_base 5: mod_base = OTHER; note = 2'-O-methyluridine-3'-phosphate
  modified_base 6: mod_base = OTHER; note = 2'-O-methyladenosine-3'-phosphate
  modified_base 7: mod_base = OTHER; note = 2'-deoxy-2'-fluorocytidine-3'-phosphate
  modified_base 8: mod_base = OTHER; note = 2'-O-methylcytidine-3'-phosphate
  modified_base 9: mod_base = OTHER; note = 2'-deoxy-2'-fluoroadenosine-3'-phosphate
  modified_base 10: mod_base = OTHER; note = 2'-deoxy-2'-fluoroadenosine-3'-phosphate
  modified_base 11: mod_base = OTHER; note = 2'-deoxy-2'-fluoroguanosine-3'-phosphate
  modified_base 12: mod_base = OTHER; note = 2'-O-methyladenosine-3'-phosphate
  modified_base 13: mod_base = OTHER; note = 2'-O-methylguanosine-3'-phosphate
  modified_base 14: mod_base = OTHER; note = 2'-O-methyluridine-3'-phosphate
  modified_base 15: mod_base = OTHER; note = 2'-O-methylcytidine-3'-phosphate
  modified_base 16: mod_base = OTHER; note = 2'-O-methylcytidine-3'-phosphate
  modified_base 17: mod_base = OTHER; note = 2'-O-methylcytidine-3'-phosphate
  modified_base 18: mod_base = OTHER; note = 2'-O-methyladenosine-3'-phosphate
  modified_base 19: mod_base = OTHER; note = 2'-O-methyladenosine-3'-phosphate
  modified_base 20: mod_base = OTHER; note = 2'-O-methylcytidine-3'-phosphate
  modified_base 21: mod_base = OTHER; note = 2'-O-methyluridine-3'-phosphate ((2S,4R)-1-[29-[[2-(acetylamino)-2-deoxy-beta-D-galactopyra nosyl]oxy]-14,14-bis[[3-[[3-[[5-[[2-(acetylamino)-2-deoxy-b eta-D-galactopyranosyl]oxy]-1-oxopentyl]amino]propyl]amino] -3-oxopropoxy]methyl]-1,12,19,25-tetraoxo-16-oxa-13,20,24-t riazanonacos-1-yl]-4-hydroxy-2-pyrrolidinyl)methyl ester
gatataccaagagtcccaact

SEQ ID NO: 1775 - RNA, 21 nt, synthetic construct
  source 1..21: mol_type = other RNA
  modified_base 1: mod_base = OTHER; note = 2'-O-methyladenosine-3'-phosphorothioate
  modified_base 2: mod_base = OTHER; note = 2'-O-methylcytidine-3'-phosphorothioate
  modified_base 3: mod_base = OTHER; note = 2'-O-methylcytidine-3'-phosphate
  modified_base 4: mod_base = OTHER; note = 2'-O-methyladenosine-3'-phosphate
  modified_base 5: mod_base = OTHER; note = 2'-O-methyladenosine-3'-phosphate
  modified_base 6: mod_base = OTHER; note = 2'-O-methylguanosine-3'-phosphate
  modified_base 7: mod_base = OTHER; note = 2'-deoxy-2'-fluoroadenosine-3'-phosphate
  modified_base 8: mod_base = OTHER; note = 2'-O-methylguanosine-3'-phosphate
  modified_base 9: mod_base = OTHER; note = 2'-deoxy-2'-fluorouridine-3'-phosphate
  modified_base 10: mod_base = OTHER; note = 2'-deoxy-2'-fluorocytidine-3'-phosphate
  modified_base 11: mod_base = OTHER; note = 2'-deoxy-2'-fluorocytidine-3'-phosphate
  modified_base 12: mod_base = OTHER; note = 2'-O-methylcytidine-3'-phosphate
  modified_base 13: mod_base = OTHER; note = 2'-O-methyladenosine-3'-phosphate
  modified_base 14: mod_base = OTHER; note = 2'-O-methyladenosine-3'-phosphate
  modified_base 15: mod_base = OTHER; note = 2'-O-methylcytidine-3'-phosphate
  modified_base 16: mod_base = OTHER; note = 2'-O-methylcytidine-3'-phosphate
  modified_base 17: mod_base = OTHER; note = 2'-O-methyladenosine-3'-phosphate
  modified_base 18: mod_base = OTHER; note = 2'-O-methyladenosine-3'-phosphate
  modified_base 19: mod_base = OTHER; note = 2'-O-methylcytidine-3'-phosphate
  modified_base 20: mod_base = OTHER; note = 2'-O-methyluridine-3'-phosphate
  modified_base 21: mod_base = OTHER; note = 2'-O-methyluridine-3'-phosphate ((2S,4R)-1-[29-[[2-(acetylamino)-2-deoxy-beta-D-galactopyra nosyl]oxy]-14,14-bis[[3-[[3-[[5-[[2-(acetylamino)-2-deoxy-b eta-D-galactopyranosyl]oxy]-1-oxopentyl]amino]propyl]amino] -3-oxopropoxy]methyl]-1,12,19,25-tetraoxo-16-oxa-13,20,24-t riazanonacos-1-yl]-4-hydroxy-2-pyrrolidinyl)methyl ester
accaagagtcccaaccaactt

SEQ ID NO: 1776 - RNA, 21 nt, synthetic construct
  source 1..21: mol_type = other RNA
  modified_base 1: mod_base = OTHER; note = 2'-O-methyladenosine-3'-phosphorothioate
  modified_base 2: mod_base = OTHER; note = 2'-O-methylguanosine-3'-phosphorothioate
  modified_base 3: mod_base = OTHER; note = 2'-O-methyluridine-3'-phosphate
  modified_base 4: mod_base = OTHER; note = 2'-O-methylcytidine-3'-phosphate
  modified_base 5: mod_base = OTHER; note = 2'-O-methylcytidine-3'-phosphate
  modified_base 6: mod_base = OTHER; note = 2'-O-methylcytidine-3'-phosphate
  modified_base 7: mod_base = OTHER; note = 2'-deoxy-2'-fluoroadenosine-3'-phosphate
  modified_base 8: mod_base = OTHER; note = 2'-O-methyladenosine-3'-phosphate
  modified_base 9: mod_base = OTHER; note = 2'-deoxy-2'-fluorocytidine-3'-phosphate
  modified_base 10: mod_base = OTHER; note = 2'-deoxy-2'-fluorocytidine-3'-phosphate
  modified_base 11: mod_base = OTHER; note = 2'-deoxy-2'-fluoroadenosine-3'-phosphate
  modified_base 12: mod_base = OTHER; note = 2'-O-methyladenosine-3'-phosphate
  modified_base 13: mod_base = OTHER; note = 2'-O-methylcytidine-3'-phosphate
  modified_base 14: mod_base = OTHER; note = 2'-O-methyluridine-3'-phosphate
  modified_base 15: mod_base = OTHER; note = 2'-O-methylguanosine-3'-phosphate
  modified_base 16: mod_base = OTHER; note = 2'-O-methylguanosine-3'-phosphate
  modified_base 17: mod_base = OTHER; note = 2'-O-methyluridine-3'-phosphate
  modified_base 18: mod_base = OTHER; note = 2'-O-methylcytidine-3'-phosphate
  modified_base 19: mod_base = OTHER; note = 2'-O-methyladenosine-3'-phosphate
  modified_base 20: mod_base = OTHER; note = 2'-O-methylcytidine-3'-phosphate
  modified_base 21: mod_base = OTHER; note = 2'-O-methyluridine-3'-phosphate ((2S,4R)-1-[29-[[2-(acetylamino)-2-deoxy-beta-D-galactopyra nosyl]oxy]-14,14-bis[[3-[[3-[[5-[[2-(acetylamino)-2-deoxy-b eta-D-galactopyranosyl]oxy]-1-oxopentyl]amino]propyl]amino] -3-oxopropoxy]methyl]-1,12,19,25-tetraoxo-16-oxa-13,20,24-t riazanonacos-1-yl]-4-hydroxy-2-pyrrolidinyl)methyl ester
agtcccaaccaactggtcact

SEQ ID NO: 1777 - RNA, 21 nt, synthetic construct
  source 1..21: mol_type = other RNA
  modified_base 1: mod_base = OTHER; note = 2'-O-methylguanosine-3'-phosphorothioate
  modified_base 2: mod_base = OTHER; note = 2'-O-methylcytidine-3'-phosphorothioate
  modified_base 3: mod_base = OTHER; note = 2'-O-methyladenosine-3'-phosphate
  modified_base 4: mod_base = OTHER; note = 2'-O-methyladenosine-3'-phosphate
  modified_base 5: mod_base = OTHER; note = 2'-O-methylguanosine-3'-phosphate
  modified_base 6: mod_base = OTHER; note = 2'-O-methylcytidine-3'-phosphate
  modified_base 7: mod_base = OTHER; note = 2'-deoxy-2'-fluorocytidine-3'-phosphate
  modified_base 8: mod_base = OTHER; note = 2'-O-methylguanosine-3'-phosphate
  modified_base 9: mod_base = OTHER; note = 2'-deoxy-2'-fluoroadenosine-3'-phosphate
  modified_base 10: mod_base = OTHER; note = 2'-deoxy-2'-fluorocytidine-3'-phosphate
  modified_base 11: mod_base = OTHER; note = 2'-deoxy-2'-fluorouridine-3'-phosphate
  modified_base 12: mod_base = OTHER; note = 2'-O-methylcytidine-3'-phosphate
  modified_base 13: mod_base = OTHER; note = 2'-O-methylcytidine-3'-phosphate
  modified_base 14: mod_base = OTHER; note = 2'-O-methyladenosine-3'-phosphate
  modified_base 15: mod_base = OTHER; note = 2'-O-methylguanosine-3'-phosphate
  modified_base 16: mod_base = OTHER; note = 2'-O-methylcytidine-3'-phosphate
  modified_base 17: mod_base = OTHER; note = 2'-O-methyluridine-3'-phosphate
  modified_base 18: mod_base = OTHER; note = 2'-O-methylcytidine-3'-phosphate
  modified_base 19: mod_base = OTHER; note = 2'-O-methylguanosine-3'-phosphate
  modified_base 20: mod_base = OTHER; note = 2'-O-methyluridine-3'-phosphate
  modified_base 21: mod_base = OTHER; note = 2'-O-methyluridine-3'-phosphate ((2S,4R)-1-[29-[[2-(acetylamino)-2-deoxy-beta-D-galactopyra nosyl]oxy]-14,14-bis[[3-[[3-[[5-[[2-(acetylamino)-2-deoxy-b eta-D-galactopyranosyl]oxy]-1-oxopentyl]amino]propyl]amino] -3-oxopropoxy]methyl]-1,12,19,25-tetraoxo-16-oxa-13,20,24-t riazanonacos-1-yl]-4-hydroxy-2-pyrrolidinyl)methyl ester
gcaagccgactccagctcgtt

SEQ ID NO: 1778 - RNA, 21 nt, synthetic construct
  source 1..21: mol_type = other RNA
  modified_base 1: mod_base = OTHER; note = 2'-O-methylcytidine-3'-phosphorothioate
  modified_base 2: mod_base = OTHER; note = 2'-O-methylguanosine-3'-phosphorothioate
  modified_base 3: mod_base = OTHER; note = 2'-O-methyladenosine-3'-phosphate
  modified_base 4: mod_base = OTHER; note = 2'-O-methylcytidine-3'-phosphate
  modified_base 5: mod_base = OTHER; note = 2'-O-methyluridine-3'-phosphate
  modified_base 6: mod_base = OTHER; note = 2'-O-methylcytidine-3'-phosphate
  modified_base 7: mod_base = OTHER; note = 2'-deoxy-2'-fluorocytidine-3'-phosphate
  modified_base 8: mod_base = OTHER; note = 2'-O-methyladenosine-3'-phosphate
  modified_base 9: mod_base = OTHER; note = 2'-deoxy-2'-fluoroguanosine-3'-phosphate
  modified_base 10: mod_base = OTHER; note = 2'-deoxy-2'-fluorocytidine-3'-phosphate
  modified_base 11: mod_base = OTHER; note = 2'-deoxy-2'-fluorouridine-3'-phosphate
  modified_base 12: mod_base = OTHER; note = 2'-O-methylcytidine-3'-phosphate
  modified_base 13: mod_base = OTHER; note = 2'-O-methylguanosine-3'-phosphate
  modified_base 14: mod_base = OTHER; note = 2'-O-methyluridine-3'-phosphate
  modified_base 15: mod_base = OTHER; note = 2'-O-methyladenosine-3'-phosphate
  modified_base 16: mod_base = OTHER; note = 2'-O-methyluridine-3'-phosphate
  modified_base 17: mod_base = OTHER; note = 2'-O-methylcytidine-3'-phosphate
  modified_base 18: mod_base = OTHER; note = 2'-O-methyladenosine-3'-phosphate
  modified_base 19: mod_base = OTHER; note = 2'-O-methylguanosine-3'-phosphate
  modified_base 20: mod_base = OTHER; note = 2'-O-methylcytidine-3'-phosphate
  modified_base 21: mod_base = OTHER; note = 2'-O-methyluridine-3'-phosphate ((2S,4R)-1-[29-[[2-(acetylamino)-2-deoxy-beta-D-galactopyra nosyl]oxy]-14,14-bis[[3-[[3-[[5-[[2-(acetylamino)-2-deoxy-b eta-D-galactopyranosyl]oxy]-1-oxopentyl]amino]propyl]amino] -3-oxopropoxy]methyl]-1,12,19,25-tetraoxo-16-oxa-13,20,24-t riazanonacos-1-yl]-4-hydroxy-2-pyrrolidinyl)methyl ester
cgactccagctcgtatcagct

SEQ ID NO: 1779 - RNA, 21 nt, synthetic construct
  source 1..21: mol_type = other RNA
  modified_base 1: mod_base = OTHER; note = 2'-O-methylcytidine-3'-phosphorothioate
  modified_base 2: mod_base = OTHER; note = 2'-O-methyluridine-3'-phosphorothioate
  modified_base 3: mod_base = OTHER; note = 2'-O-methylcytidine-3'-phosphate
  modified_base 4: mod_base = OTHER; note = 2'-O-methylguanosine-3'-phosphate
  modified_base 5: mod_base = OTHER; note = 2'-O-methyluridine-3'-phosphate
  modified_base 6: mod_base = OTHER; note = 2'-O-methyladenosine-3'-phosphate
  modified_base 7: mod_base = OTHER; note = 2'-deoxy-2'-fluorouridine-3'-phosphate
  modified_base 8: mod_base = OTHER; note = 2'-O-methylcytidine-3'-phosphate
  modified_base 9: mod_base = OTHER; note = 2'-deoxy-2'-fluoroadenosine-3'-phosphate
  modified_base 10: mod_base = OTHER; note = 2'-deoxy-2'-fluoroguanosine-3'-phosphate
  modified_base 11: mod_base = OTHER; note = 2'-deoxy-2'-fluorocytidine-3'-phosphate
  modified_base 12: mod_base = OTHER; note = 2'-O-methylcytidine-3'-phosphate
  modified_base 13: mod_base = OTHER; note = 2'-O-methyladenosine-3'-phosphate
  modified_base 14: mod_base = OTHER; note = 2'-O-methyluridine-3'-phosphate
  modified_base 15: mod_base = OTHER; note = 2'-O-methylcytidine-3'-phosphate
  modified_base 16: mod_base = OTHER; note = 2'-O-methyladenosine-3'-phosphate
  modified_base 17: mod_base = OTHER; note = 2'-O-methyladenosine-3'-phosphate
  modified_base 18: mod_base = OTHER; note = 2'-O-methylcytidine-3'-phosphate
  modified_base 19: mod_base = OTHER; note = 2'-O-methylcytidine-3'-phosphate
  modified_base 20: mod_base = OTHER; note = 2'-O-methyluridine-3'-phosphate
  modified_base 21: mod_base = OTHER; note = 2'-O-methyluridine-3'-phosphate ((2S,4R)-1-[29-[[2-(acetylamino)-2-deoxy-beta-D-galactopyra nosyl]oxy]-14,14-bis[[3-[[3-[[5-[[2-(acetylamino)-2-deoxy-b eta-D-galactopyranosyl]oxy]-1-oxopentyl]amino]propyl]amino] -3-oxopropoxy]methyl]-1,12,19,25-tetraoxo-16-oxa-13,20,24-t riazanonacos-1-yl]-4-hydroxy-2-pyrrolidinyl)methyl ester
ctcgtatcagccatcaacctt

SEQ ID NO: 1780 - RNA, 21 nt, synthetic construct
  source 1..21: mol_type = other RNA
  modified_base 1: mod_base = OTHER; note = 2'-O-methyladenosine-3'-phosphorothioate
  modified_base 2: mod_base = OTHER; note = 2'-O-methylguanosine-3'-phosphorothioate
  modified_base 3: mod_base = OTHER; note = 2'-O-methylcytidine-3'-phosphate
  modified_base 4: mod_base = OTHER; note = 2'-O-methylcytidine-3'-phosphate
  modified_base 5: mod_base = OTHER; note = 2'-O-methyladenosine-3'-phosphate
  modified_base 6: mod_base = OTHER; note = 2'-O-methyluridine-3'-phosphate
  modified_base 7: mod_base = OTHER; note = 2'-deoxy-2'-fluorocytidine-3'-phosphate
  modified_base 8: mod_base = OTHER; note = 2'-O-methyladenosine-3'-phosphate
  modified_base 9: mod_base = OTHER; note = 2'-deoxy-2'-fluoroadenosine-3'-phosphate
  modified_base 10: mod_base = OTHER; note = 2'-deoxy-2'-fluorocytidine-3'-phosphate
  modified_base 11: mod_base = OTHER; note = 2'-deoxy-2'-fluorocytidine-3'-phosphate
  modified_base 12: mod_base = OTHER; note = 2'-O-methyluridine-3'-phosphate
  modified_base 13: mod_base = OTHER; note = 2'-O-methylcytidine-3'-phosphate
  modified_base 14: mod_base = OTHER; note = 2'-O-methyluridine-3'-phosphate
  modified_base 15: mod_base = OTHER; note = 2'-O-methylcytidine-3'-phosphate
  modified_base 16: mod_base = OTHER; note = 2'-O-methylcytidine-3'-phosphate
  modified_base 17: mod_base = OTHER; note = 2'-O-methyladenosine-3'-phosphate
  modified_base 18: mod_base = OTHER; note = 2'-O-methylcytidine-3'-phosphate
  modified_base 19: mod_base = OTHER; note = 2'-O-methyluridine-3'-phosphate
  modified_base 20: mod_base = OTHER; note = 2'-O-methylguanosine-3'-phosphate
  modified_base 21: mod_base = OTHER; note = 2'-O-methyluridine-3'-phosphate ((2S,4R)-1-[29-[[2-(acetylamino)-2-deoxy-beta-D-galactopyra nosyl]oxy]-14,14-bis[[3-[[3-[[5-[[2-(acetylamino)-2-deoxy-b eta-D-galactopyranosyl]oxy]-1-oxopentyl]amino]propyl]amino] -3-oxopropoxy]methyl]-1,12,19,25-tetraoxo-16-oxa-13,20,24-t riazanonacos-1-yl]-4-hydroxy-2-pyrrolidinyl)methyl ester
agccatcaacctctccactgt

SEQ ID NO: 1781 - RNA, 21 nt, synthetic construct
  source 1..21: mol_type = other RNA
  modified_base 1: mod_base = OTHER; note = 2'-O-methyluridine-3'-phosphorothioate
  modified_base 2: mod_base = OTHER; note = 2'-O-methylcytidine-3'-phosphorothioate
  modified_base 3: mod_base = OTHER; note = 2'-O-methyladenosine-3'-phosphate
  modified_base 4: mod_base = OTHER; note = 2'-O-methyladenosine-3'-phosphate
  modified_base 5: mod_base = OTHER; note = 2'-O-methylcytidine-3'-phosphate
  modified_base 6: mod_base = OTHER; note = 2'-O-methylcytidine-3'-phosphate
  modified_base 7: mod_base = OTHER; note = 2'-deoxy-2'-fluorouridine-3'-phosphate
  modified_base 8: mod_base = OTHER; note = 2'-O-methylcytidine-3'-phosphate
  modified_base 9: mod_base = OTHER; note = 2'-deoxy-2'-fluorouridine-3'-phosphate
  modified_base 10: mod_base = OTHER; note = 2'-deoxy-2'-fluorocytidine-3'-phosphate
  modified_base 11: mod_base = OTHER; note = 2'-deoxy-2'-fluorocytidine-3'-phosphate
  modified_base 12: mod_base = OTHER; note = 2'-O-methyladenosine-3'-phosphate
  modified_base 13: mod_base = OTHER; note = 2'-O-methylcytidine-3'-phosphate
  modified_base 14: mod_base = OTHER; note = 2'-O-methyluridine-3'-phosphate
  modified_base 15: mod_base = OTHER; note = 2'-O-methylguanosine-3'-phosphate
  modified_base 16: mod_base = OTHER; note = 2'-O-methylcytidine-3'-phosphate
  modified_base 17: mod_base = OTHER; note = 2'-O-methylcytidine-3'-phosphate
  modified_base 18: mod_base = OTHER; note = 2'-O-methyladenosine-3'-phosphate
  modified_base 19: mod_base = OTHER; note = 2'-O-methyladenosine-3'-phosphate
  modified_base 20: mod_base = OTHER; note = 2'-O-methylguanosine-3'-phosphate
  modified_base 21: mod_base = OTHER; note = 2'-O-methyluridine-3'-phosphate ((2S,4R)-1-[29-[[2-(acetylamino)-2-deoxy-beta-D-galactopyra nosyl]oxy]-14,14-bis[[3-[[3-[[5-[[2-(acetylamino)-2-deoxy-b eta-D-galactopyranosyl]oxy]-1-oxopentyl]amino]propyl]amino] -3-oxopropoxy]methyl]-1,12,19,25-tetraoxo-16-oxa-13,20,24-t riazanonacos-1-yl]-4-hydroxy-2-pyrrolidinyl)methyl ester
tcaacctctccactgccaagt

SEQ ID NO: 1782 - RNA, 21 nt, synthetic construct
  source 1..21: mol_type = other RNA
  modified_base 1: mod_base = OTHER; note = 2'-O-methylcytidine-3'-phosphorothioate
  modified_base 2: mod_base = OTHER; note = 2'-O-methyluridine-3'-phosphorothioate
  modified_base 3: mod_base = OTHER; note = 2'-O-methylcytidine-3'-phosphate
  modified_base 4: mod_base = OTHER; note = 2'-O-methyluridine-3'-phosphate
  modified_base 5: mod_base = OTHER; note = 2'-O-methylcytidine-3'-phosphate
  modified_base 6: mod_base = OTHER; note = 2'-O-methylcytidine-3'-phosphate
  modified_base 7: mod_base = OTHER; note = 2'-deoxy-2'-fluoroadenosine-3'-phosphate
  modified_base 8: mod_base = OTHER; note = 2'-O-methylcytidine-3'-phosphate
  modified_base 9: mod_base = OTHER; note = 2'-deoxy-2'-fluorouridine-3'-phosphate
  modified_base 10: mod_base = OTHER; note = 2'-deoxy-2'-fluoroguanosine-3'-phosphate
  modified_base 11: mod_base = OTHER; note = 2'-deoxy-2'-fluorocytidine-3'-phosphate
  modified_base 12: mod_base = OTHER; note = 2'-O-methylcytidine-3'-phosphate
  modified_base 13: mod_base = OTHER; note = 2'-O-methyladenosine-3'-phosphate
  modified_base 14: mod_base = OTHER; note = 2'-O-methyladenosine-3'-phosphate
  modified_base 15: mod_base = OTHER; note = 2'-O-methylguanosine-3'-phosphate
  modified_base 16: mod_base = OTHER; note = 2'-O-methylguanosine-3'-phosphate
  modified_base 17: mod_base = OTHER; note = 2'-O-methyladenosine-3'-phosphate
  modified_base 18: mod_base = OTHER; note = 2'-O-methyluridine-3'-phosphate
  modified_base 19: mod_base = OTHER; note = 2'-O-methyluridine-3'-phosphate
  modified_base 20: mod_base = OTHER; note = 2'-O-methylcytidine-3'-phosphate
  modified_base 21: mod_base = OTHER; note = 2'-O-methyluridine-3'-phosphate ((2S,4R)-1-[29-[[2-(acetylamino)-2-deoxy-beta-D-galactopyra nosyl]oxy]-14,14-bis[[3-[[3-[[5-[[2-(acetylamino)-2-deoxy-b eta-D-galactopyranosyl]oxy]-1-oxopentyl]amino]propyl]amino] -3-oxopropoxy]methyl]-1,12,19,25-tetraoxo-16-oxa-13,20,24-t riazanonacos-1-yl]-4-hydroxy-2-pyrrolidinyl)methyl ester
ctctccactgccaaggattct

SEQ ID NO: 1783 - RNA, 21 nt, synthetic construct
  source 1..21: mol_type = other RNA
  modified_base 1: mod_base = OTHER; note = 2'-O-methyluridine-3'-phosphorothioate
  modified_base 2: mod_base = OTHER; note = 2'-O-methylguanosine-3'-phosphorothioate
  modified_base 3: mod_base = OTHER; note = 2'-O-methylcytidine-3'-phosphate
  modified_base 4: mod_base = OTHER; note = 2'-O-methylcytidine-3'-phosphate
  modified_base 5: mod_base = OTHER; note = 2'-O-methyladenosine-3'-phosphate
  modified_base 6: mod_base = OTHER; note = 2'-O-methyladenosine-3'-phosphate
  modified_base 7: mod_base = OTHER; note = 2'-deoxy-2'-fluoroguanosine-3'-phosphate
  modified_base 8: mod_base = OTHER; note = 2'-O-methylguanosine-3'-phosphate
  modified_base 9: mod_base = OTHER; note = 2'-deoxy-2'-fluoroadenosine-3'-phosphate
  modified_base 10: mod_base = OTHER; note = 2'-deoxy-2'-fluorouridine-3'-phosphate
  modified_base 11: mod_base = OTHER; note = 2'-deoxy-2'-fluorouridine-3'-phosphate
  modified_base 12: mod_base = OTHER; note = 2'-O-methylcytidine-3'-phosphate
  modified_base 13: mod_base = OTHER; note = 2'-O-methylcytidine-3'-phosphate
  modified_base 14: mod_base = OTHER; note = 2'-O-methyladenosine-3'-phosphate
  modified_base 15: mod_base = OTHER; note = 2'-O-methyladenosine-3'-phosphate
  modified_base 16: mod_base = OTHER; note = 2'-O-methyladenosine-3'-phosphate
  modified_base 17: mod_base = OTHER; note = 2'-O-methylguanosine-3'-phosphate
  modified_base 18: mod_base = OTHER; note = 2'-O-methylcytidine-3'-phosphate
  modified_base 19: mod_base = OTHER; note = 2'-O-methylcytidine-3'-phosphate
  modified_base 20: mod_base = OTHER; note = 2'-O-methylguanosine-3'-phosphate
  modified_base 21: mod_base = OTHER; note = 2'-O-methyluridine-3'-phosphate ((2S,4R)-1-[29-[[2-(acetylamino)-2-deoxy-beta-D-galactopyra nosyl]oxy]-14,14-bis[[3-[[3-[[5-[[2-(acetylamino)-2-deoxy-b eta-D-galactopyranosyl]oxy]-1-oxopentyl]amino]propyl]amino] -3-oxopropoxy]methyl]-1,12,19,25-tetraoxo-16-oxa-13,20,24-t riazanonacos-1-yl]-4-hydroxy-2-pyrrolidinyl)methyl ester
tgccaaggattccaaagccgt

SEQ ID NO: 1784 - RNA, 21 nt, synthetic construct
  source 1..21: mol_type = other RNA
  modified_base 1: mod_base = OTHER; note = 2'-O-methylguanosine-3'-phosphorothioate
  modified_base 2: mod_base = OTHER; note = 2'-O-methyladenosine-3'-phosphorothioate
  modified_base 3: mod_base = OTHER; note = 2'-O-methyluridine-3'-phosphate
  modified_base 4: mod_base = OTHER; note = 2'-O-methyluridine-3'-phosphate
  modified_base 5: mod_base = OTHER; note = 2'-O-methylcytidine-3'-phosphate
  modified_base 6: mod_base = OTHER; note = 2'-O-methylcytidine-3'-phosphate
  modified_base 7: mod_base = OTHER; note = 2'-deoxy-2'-fluoroadenosine-3'-phosphate
  modified_base 8: mod_base = OTHER; note = 2'-O-methyladenosine-3'-phosphate
  modified_base 9: mod_base = OTHER; note = 2'-deoxy-2'-fluoroadenosine-3'-phosphate
  modified_base 10: mod_base = OTHER; note = 2'-deoxy-2'-fluoroguanosine-3'-phosphate
  modified_base 11: mod_base = OTHER; note = 2'-deoxy-2'-fluorocytidine-3'-phosphate
  modified_base 12: mod_base = OTHER; note = 2'-O-methylcytidine-3'-phosphate
  modified_base 13: mod_base = OTHER; note = 2'-O-methylguanosine-3'-phosphate
  modified_base 14: mod_base = OTHER; note = 2'-O-methyluridine-3'-phosphate
  modified_base 15: mod_base = OTHER; note = 2'-O-methylguanosine-3'-phosphate
  modified_base 16: mod_base = OTHER; note = 2'-O-methylguanosine-3'-phosphate
  modified_base 17: mod_base = OTHER; note = 2'-O-methyluridine-3'-phosphate
  modified_base 18: mod_base = OTHER; note = 2'-O-methylcytidine-3'-phosphate
  modified_base 19: mod_base = OTHER; note = 2'-O-methyladenosine-3'-phosphate
  modified_base 20: mod_base = OTHER; note = 2'-O-methylcytidine-3'-phosphate
  modified_base 21: mod_base = OTHER; note = 2'-O-methyluridine-3'-phosphate ((2S,4R)-1-[29-[[2-(acetylamino)-2-deoxy-beta-D-galactopyra nosyl]oxy]-14,14-bis[[3-[[3-[[5-[[2-(acetylamino)-2-deoxy-b eta-D-galactopyranosyl]oxy]-1-oxopentyl]amino]propyl]amino] -3-oxopropoxy]methyl]-1,12,19,25-tetraoxo-16-oxa-13,20,24-t riazanonacos-1-yl]-4-hydroxy-2-pyrrolidinyl)methyl ester
gattccaaagccgtggtcact

SEQ ID NO: 1785 - RNA, 21 nt, synthetic construct
  source 1..21: mol_type = other RNA
  modified_base 1: mod_base = OTHER; note = 2'-O-methyladenosine-3'-phosphorothioate
  modified_base 2: mod_base = OTHER; note = 2'-O-methyladenosine-3'-phosphorothioate
  modified_base 3: mod_base = OTHER; note = 2'-O-methyladenosine-3'-phosphate
  modified_base 4: mod_base = OTHER; note = 2'-O-methylguanosine-3'-phosphate
  modified_base 5: mod_base = OTHER; note = 2'-O-methylcytidine-3'-phosphate
  modified_base 6: mod_base = OTHER; note = 2'-O-methylcytidine-3'-phosphate
  modified_base 7: mod_base = OTHER; note = 2'-deoxy-2'-fluoroguanosine-3'-phosphate
  modified_base 8: mod_base = OTHER; note = 2'-O-methyluridine-3'-phosphate
  modified_base 9: mod_base = OTHER; note = 2'-deoxy-2'-fluoroguanosine-3'-phosphate
  modified_base 10: mod_base = OTHER; note = 2'-deoxy-2'-fluoroguanosine-3'-phosphate
  modified_base 11: mod_base = OTHER; note = 2'-deoxy-2'-fluorouridine-3'-phosphate
  modified_base 12: mod_base = OTHER; note = 2'-O-methylcytidine-3'-phosphate
  modified_base 13: mod_base = OTHER; note = 2'-O-methyladenosine-3'-phosphate
  modified_base 14: mod_base = OTHER; note = 2'-O-methylcytidine-3'-phosphate
  modified_base 15: mod_base = OTHER; note = 2'-O-methylcytidine-3'-phosphate
  modified_base 16: mod_base = OTHER; note = 2'-O-methyluridine-3'-phosphate
  modified_base 17: mod_base = OTHER; note = 2'-O-methylguanosine-3'-phosphate
  modified_base 18: mod_base = OTHER; note = 2'-O-methyluridine-3'-phosphate
  modified_base 19: mod_base = OTHER; note = 2'-O-methylguanosine-3'-phosphate
  modified_base 20: mod_base = OTHER; note = 2'-O-methyluridine-3'-phosphate
  modified_base 21: mod_base = OTHER; note = 2'-O-methyluridine-3'-phosphate ((2S,4R)-1-[29-[[2-(acetylamino)-2-deoxy-beta-D-galactopyra nosyl]oxy]-14,14-bis[[3-[[3-[[5-[[2-(acetylamino)-2-deoxy-b eta-D-galactopyranosyl]oxy]-1-oxopentyl]amino]propyl]amino] -3-oxopropoxy]methyl]-1,12,19,25-tetraoxo-16-oxa-13,20,24-t riazanonacos-1-yl]-4-hydroxy-2-pyrrolidinyl)methyl ester
aaagccgtggtcacctgtgtt

SEQ ID NO: 1786 - RNA, 21 nt, synthetic construct
  source 1..21: mol_type = other RNA
  modified_base 1: mod_base = OTHER; note = 2'-O-methyluridine-3'-phosphorothioate
  modified_base 2: mod_base = OTHER; note = 2'-O-methylguanosine-3'-phosphorothioate
  modified_base 3: mod_base = OTHER; note = 2'-O-methylguanosine-3'-phosphate
  modified_base 4: mod_base = OTHER; note = 2'-O-methyluridine-3'-phosphate
  modified_base 5: mod_base = OTHER; note = 2'-O-methylcytidine-3'-phosphate
  modified_base 6: mod_base = OTHER; note = 2'-O-methyladenosine-3'-phosphate
  modified_base 7: mod_base = OTHER; note = 2'-deoxy-2'-fluorocytidine-3'-phosphate
  modified_base 8: mod_base = OTHER; note = 2'-O-methylcytidine-3'-phosphate
  modified_base 9: mod_base = OTHER; note = 2'-deoxy-2'-fluorouridine-3'-phosphate
  modified_base 10: mod_base = OTHER; note = 2'-deoxy-2'-fluoroguanosine-3'-phosphate
  modified_base 11: mod_base = OTHER; note = 2'-deoxy-2'-fluorouridine-3'-phosphate
  modified_base 12: mod_base = OTHER; note = 2'-O-methylguanosine-3'-phosphate
  modified_base 13: mod_base = OTHER; note = 2'-O-methyluridine-3'-phosphate
  modified_base 14: mod_base = OTHER; note = 2'-O-methylguanosine-3'-phosphate
  modified_base 15: mod_base = OTHER; note = 2'-O-methyladenosine-3'-phosphate
  modified_base 16: mod_base = OTHER; note = 2'-O-methyluridine-3'-phosphate
  modified_base 17: mod_base = OTHER; note = 2'-O-methylcytidine-3'-phosphate
  modified_base 18: mod_base = OTHER; note = 2'-O-methyladenosine-3'-phosphate
  modified_base 19: mod_base = OTHER; note = 2'-O-methyluridine-3'-phosphate
  modified_base 20: mod_base = OTHER; note = 2'-O-methyluridine-3'-phosphate
  modified_base 21: mod_base = OTHER; note = 2'-O-methyluridine-3'-phosphate ((2S,4R)-1-[29-[[2-(acetylamino)-2-deoxy-beta-D-galactopyra nosyl]oxy]-14,14-bis[[3-[[3-[[5-[[2-(acetylamino)-2-deoxy-b eta-D-galactopyranosyl]oxy]-1-oxopentyl]amino]propyl]amino] -3-oxopropoxy]methyl]-1,12,19,25-tetraoxo-16-oxa-13,20,24-t riazanonacos-1-yl]-4-hydroxy-2-pyrrolidinyl)methyl ester
tggtcacctgtgtgatcattt

SEQ ID NO: 1787 - RNA, 21 nt, synthetic construct
  source 1..21: mol_type = other RNA
  modified_base 1: mod_base = OTHER; note = 2'-O-methyladenosine-3'-phosphorothioate
  modified_base 2: mod_base = OTHER; note = 2'-O-methylcytidine-3'-phosphorothioate
  modified_base 3: mod_base = OTHER; note = 2'-O-methylcytidine-3'-phosphate
  modified_base 4: mod_base = OTHER; note = 2'-O-methyluridine-3'-phosphate
  modified_base 5: mod_base = OTHER; note = 2'-O-methylguanosine-3'-phosphate
  modified_base 6: mod_base = OTHER; note = 2'-O-methyluridine-3'-phosphate
  modified_base 7: mod_base = OTHER; note = 2'-deoxy-2'-fluoroguanosine-3'-phosphate
  modified_base 8: mod_base = OTHER; note = 2'-O-methyluridine-3'-phosphate
  modified_base 9: mod_base = OTHER; note = 2'-deoxy-2'-fluoroguanosine-3'-phosphate
  modified_base 10: mod_base = OTHER; note = 2'-deoxy-2'-fluoroadenosine-3'-phosphate
  modified_base 11: mod_base = OTHER; note = 2'-deoxy-2'-fluorouridine-3'-phosphate
  modified_base 12: mod_base = OTHER; note = 2'-O-methylcytidine-3'-phosphate
  modified_base 13: mod_base = OTHER; note = 2'-O-methyladenosine-3'-phosphate
  modified_base 14: mod_base = OTHER; note = 2'-O-methyluridine-3'-phosphate
  modified_base 15: mod_base = OTHER; note = 2'-O-methyluridine-3'-phosphate
  modified_base 16: mod_base = OTHER; note = 2'-O-methylguanosine-3'-phosphate
  modified_base 17: mod_base = OTHER; note = 2'-O-methyluridine-3'-phosphate
  modified_base 18: mod_base = OTHER; note = 2'-O-methylguanosine-3'-phosphate
  modified_base 19: mod_base = OTHER; note = 2'-O-methylcytidine-3'-phosphate
  modified_base 20: mod_base = OTHER; note = 2'-O-methyluridine-3'-phosphate
  modified_base 21: mod_base = OTHER; note = 2'-O-methyluridine-3'-phosphate ((2S,4R)-1-[29-[[2-(acetylamino)-2-deoxy-beta-D-galactopyra nosyl]oxy]-14,14-bis[[3-[[3-[[5-[[2-(acetylamino)-2-deoxy-b eta-D-galactopyranosyl]oxy]-1-oxopentyl]amino]propyl]amino] -3-oxopropoxy]methyl]-1,12,19,25-tetraoxo-16-oxa-13,20,24-t riazanonacos-1-yl]-4-hydroxy-2-pyrrolidinyl)methyl ester
acctgtgtgatcattgtgctt

SEQ ID NO: 1788 - RNA, 21 nt, synthetic construct
  source 1..21: mol_type = other RNA
  modified_base 1: mod_base = OTHER; note = 2'-O-methylguanosine-3'-phosphorothioate
  modified_base 2: mod_base = OTHER; note = 2'-O-methyluridine-3'-phosphorothioate
  modified_base 3: mod_base = OTHER; note = 2'-O-methylguanosine-3'-phosphate
  modified_base 4: mod_base = OTHER; note = 2'-O-methyladenosine-3'-phosphate
  modified_base 5: mod_base = OTHER; note = 2'-O-methyluridine-3'-phosphate
  modified_base 6: mod_base = OTHER; note = 2'-O-methylcytidine-3'-phosphate
  modified_base 7: mod_base = OTHER; note = 2'-deoxy-2'-fluoroadenosine-3'-phosphate
  modified_base 8: mod_base = OTHER; note = 2'-O-methyluridine-3'-phosphate
  modified_base 9: mod_base = OTHER; note = 2'-deoxy-2'-fluorouridine-3'-phosphate
  modified_base 10: mod_base = OTHER; note = 2'-deoxy-2'-fluoroguanosine-3'-phosphate
  modified_base 11: mod_base = OTHER; note = 2'-deoxy-2'-fluorouridine-3'-phosphate
  modified_base 12: mod_base = OTHER; note = 2'-O-methylguanosine-3'-phosphate
  modified_base 13: mod_base = OTHER; note = 2'-O-methylcytidine-3'-phosphate
  modified_base 14: mod_base = OTHER; note = 2'-O-methyluridine-3'-phosphate
  modified_base 15: mod_base = OTHER; note = 2'-O-methylguanosine-3'-phosphate
  modified_base 16: mod_base = OTHER; note = 2'-O-methyluridine-3'-phosphate
  modified_base 17: mod_base = OTHER; note = 2'-O-methylcytidine-3'-phosphate
  modified_base 18: mod_base = OTHER; note = 2'-O-methyladenosine-3'-phosphate
  modified_base 19: mod_base = OTHER; note = 2'-O-methylguanosine-3'-phosphate
  modified_base 20: mod_base = OTHER; note = 2'-O-methyluridine-3'-phosphate
  modified_base 21: mod_base = OTHER; note = 2'-O-methyluridine-3'-phosphate ((2S,4R)-1-[29-[[2-(acetylamino)-2-deoxy-beta-D-galactopyra nosyl]oxy]-14,14-bis[[3-[[3-[[5-[[2-(acetylamino)-2-deoxy-b eta-D-galactopyranosyl]oxy]-1-oxopentyl]amino]propyl]amino] -3-oxopropoxy]methyl]-1,12,19,25-tetraoxo-16-oxa-13,20,24-t riazanonacos-1-yl]-4-hydroxy-2-pyrrolidinyl)methyl ester
gtgatcattgtgctgtcagtt

SEQ ID NO: 1789 - RNA, 21 nt, synthetic construct
  source 1..21: mol_type = other RNA
  modified_base 1: mod_base = OTHER; note = 2'-O-methylguanosine-3'-phosphorothioate
  modified_base 2: mod_base = OTHER; note = 2'-O-methyluridine-3'-phosphorothioate
  modified_base 3: mod_base = OTHER; note = 2'-O-methylguanosine-3'-phosphate
  modified_base 4: mod_base = OTHER; note = 2'-O-methylcytidine-3'-phosphate
  modified_base 5: mod_base = OTHER; note = 2'-O-methyluridine-3'-phosphate
  modified_base 6: mod_base = OTHER; note = 2'-O-methylguanosine-3'-phosphate
  modified_base 7: mod_base = OTHER; note = 2'-deoxy-2'-fluorouridine-3'-phosphate
  modified_base 8: mod_base = OTHER; note = 2'-O-methylcytidine-3'-phosphate
  modified_base 9: mod_base = OTHER; note = 2'-deoxy-2'-fluoroadenosine-3'-phosphate
  modified_base 10: mod_base = OTHER; note = 2'-deoxy-2'-fluoroguanosine-3'-phosphate
  modified_base 11: mod_base = OTHER; note = 2'-deoxy-2'-fluorouridine-3'-phosphate
  modified_base 12: mod_base = OTHER; note = 2'-O-methylcytidine-3'-phosphate
  modified_base 13: mod_base = OTHER; note = 2'-O-methylcytidine-3'-phosphate
  modified_base 14: mod_base = OTHER; note = 2'-O-methyluridine-3'-phosphate
  modified_base 15: mod_base = OTHER; note = 2'-O-methylguanosine-3'-phosphate
  modified_base 16: mod_base = OTHER; note = 2'-O-methylguanosine-3'-phosphate
  modified_base 17: mod_base = OTHER; note = 2'-O-methyluridine-3'-phosphate
  modified_base 18: mod_base = OTHER; note = 2'-O-methylguanosine-3'-phosphate
  modified_base 19: mod_base = OTHER; note = 2'-O-methyluridine-3'-phosphate
  modified_base 20: mod_base = OTHER; note = 2'-O-methylguanosine-3'-phosphate
  modified_base 21: mod_base = OTHER; note = 2'-O-methyluridine-3'-phosphate ((2S,4R)-1-[29-[[2-(acetylamino)-2-deoxy-beta-D-galactopyra nosyl]oxy]-14,14-bis[[3-[[3-[[5-[[2-(acetylamino)-2-deoxy-b eta-D-galactopyranosyl]oxy]-1-oxopentyl]amino]propyl]amino] -3-oxopropoxy]methyl]-1,12,19,25-tetraoxo-16-oxa-13,20,24-t riazanonacos-1-yl]-4-hydroxy-2-pyrrolidinyl)methyl ester
gtgctgtcagtcctggtgtgt

SEQ ID NO: 1790 - RNA, 21 nt, synthetic construct
  source 1..21: mol_type = other RNA
  modified_base 1: mod_base = OTHER; note = 2'-O-methyluridine-3'-phosphorothioate
  modified_base 2: mod_base = OTHER; note = 2'-O-methylcytidine-3'-phosphorothioate
  modified_base 3: mod_base = OTHER; note = 2'-O-methyladenosine-3'-phosphate
  modified_base 4: mod_base = OTHER; note = 2'-O-methylguanosine-3'-phosphate
  modified_base 5: mod_base = OTHER; note = 2'-O-methyluridine-3'-phosphate
  modified_base 6: mod_base = OTHER; note = 2'-O-methylcytidine-3'-phosphate
  modified_base 7: mod_base = OTHER; note = 2'-deoxy-2'-fluorocytidine-3'-phosphate
  modified_base 8: mod_base = OTHER; note = 2'-O-methyluridine-3'-phosphate
  modified_base 9: mod_base = OTHER; note = 2'-deoxy-2'-fluoroguanosine-3'-phosphate
  modified_base 10: mod_base = OTHER; note = 2'-deoxy-2'-fluoroguanosine-3'-phosphate
  modified_base 11: mod_base = OTHER; note = 2'-deoxy-2'-fluorouridine-3'-phosphate
  modified_base 12: mod_base = OTHER; note = 2'-O-methylguanosine-3'-phosphate
  modified_base 13: mod_base = OTHER; note = 2'-O-methyluridine-3'-phosphate
  modified_base 14: mod_base = OTHER; note = 2'-O-methylguanosine-3'-phosphate
  modified_base 15: mod_base = OTHER; note = 2'-O-methylcytidine-3'-phosphate
  modified_base 16: mod_base = OTHER; note = 2'-O-methyluridine-3'-phosphate
  modified_base 17: mod_base = OTHER; note = 2'-O-methylguanosine-3'-phosphate
  modified_base 18: mod_base = OTHER; note = 2'-O-methyluridine-3'-phosphate
  modified_base 19: mod_base = OTHER; note = 2'-O-methylcytidine-3'-phosphate
  modified_base 20: mod_base = OTHER; note = 2'-O-methyluridine-3'-phosphate
  modified_base 21: mod_base = OTHER; note = 2'-O-methyluridine-3'-phosphate ((2S,4R)-1-[29-[[2-(acetylamino)-2-deoxy-beta-D-galactopyra nosyl]oxy]-14,14-bis[[3-[[3-[[5-[[2-(acetylamino)-2-deoxy-b eta-D-galactopyranosyl]oxy]-1-oxopentyl]amino]propyl]amino] -3-oxopropoxy]methyl]-1,12,19,25-tetraoxo-16-oxa-13,20,24-t riazanonacos-1-yl]-4-hydroxy-2-pyrrolidinyl)methyl ester
tcagtcctggtgtgctgtctt

SEQ ID NO: 1791 - RNA, 21 nt, synthetic construct
  source 1..21: mol_type = other RNA
  modified_base 1: mod_base = OTHER; note = 2'-O-methylcytidine-3'-phosphorothioate
  modified_base 2: mod_base = OTHER; note = 2'-O-methyluridine-3'-phosphorothioate
  modified_base 3: mod_base = OTHER; note = 2'-O-methylguanosine-3'-phosphate
  modified_base 4: mod_base = OTHER; note = 2'-O-methylguanosine-3'-phosphate
  modified_base 5: mod_base = OTHER; note = 2'-O-methyluridine-3'-phosphate
  modified_base 6: mod_base = OTHER; note = 2'-O-methylguanosine-3'-phosphate
  modified_base 7: mod_base = OTHER; note = 2'-deoxy-2'-fluorouridine-3'-phosphate
  modified_base 8: mod_base = OTHER; note = 2'-O-methylguanosine-3'-phosphate
  modified_base 9: mod_base = OTHER; note = 2'-deoxy-2'-fluorocytidine-3'-phosphate
  modified_base 10: mod_base = OTHER; note = 2'-deoxy-2'-fluorouridine-3'-phosphate
  modified_base 11: mod_base = OTHER; note = 2'-deoxy-2'-fluoroguanosine-3'-phosphate
  modified_base 12: mod_base = OTHER; note = 2'-O-methyluridine-3'-phosphate
  modified_base 13: mod_base = OTHER; note = 2'-O-methylcytidine-3'-phosphate
  modified_base 14: mod_base = OTHER; note = 2'-O-methyluridine-3'-phosphate
  modified_base 15: mod_base = OTHER; note = 2'-O-methyluridine-3'-phosphate
  modified_base 16: mod_base = OTHER; note = 2'-O-methylcytidine-3'-phosphate
  modified_base 17: mod_base = OTHER; note = 2'-O-methylcytidine-3'-phosphate
  modified_base 18: mod_base = OTHER; note = 2'-O-methyladenosine-3'-phosphate
  modified_base 19: mod_base = OTHER; note = 2'-O-methylcytidine-3'-phosphate
  modified_base 20: mod_base = OTHER; note = 2'-O-methyluridine-3'-phosphate
  modified_base 21: mod_base = OTHER; note = 2'-O-methyluridine-3'-phosphate ((2S,4R)-1-[29-[[2-(acetylamino)-2-deoxy-beta-D-galactopyra nosyl]oxy]-14,14-bis[[3-[[3-[[5-[[2-(acetylamino)-2-deoxy-b eta-D-galactopyranosyl]oxy]-1-oxopentyl]amino]propyl]amino] -3-oxopropoxy]methyl]-1,12,19,25-tetraoxo-16-oxa-13,20,24-t riazanonacos-1-yl]-4-hydroxy-2-pyrrolidinyl)methyl ester
ctggtgtgctgtcttccactt

SEQ ID NO: 1792 - RNA, 21 nt, synthetic construct
  source 1..21: mol_type = other RNA
  modified_base 1: mod_base = OTHER; note = 2'-O-methyluridine-3'-phosphorothioate
  modified_base 2: mod_base = OTHER; note = 2'-O-methyluridine-3'-phosphorothioate
  modified_base 3: mod_base = OTHER; note = 2'-O-methyluridine-3'-phosphate
  modified_base 4: mod_base = OTHER; note = 2'-O-methylcytidine-3'-phosphate
  modified_base 5: mod_base = OTHER; note = 2'-O-methylcytidine-3'-phosphate
  modified_base 6: mod_base = OTHER; note = 2'-O-methyluridine-3'-phosphate
  modified_base 7: mod_base = OTHER; note = 2'-deoxy-2'-fluorouridine-3'-phosphate
  modified_base 8: mod_base = OTHER; note = 2'-O-methylguanosine-3'-phosphate
  modified_base 9: mod_base = OTHER; note = 2'-deoxy-2'-fluoroguanosine-3'-phosphate
  modified_base 10: mod_base = OTHER; note = 2'-deoxy-2'-fluorouridine-3'-phosphate
  modified_base 11: mod_base = OTHER; note = 2'-deoxy-2'-fluoroadenosine-3'-phosphate
  modified_base 12: mod_base = OTHER; note = 2'-O-methylcytidine-3'-phosphate
  modified_base 13: mod_base = OTHER; note = 2'-O-methyladenosine-3'-phosphate
  modified_base 14: mod_base = OTHER; note = 2'-O-methylguanosine-3'-phosphate
  modified_base 15: mod_base = OTHER; note = 2'-O-methylguanosine-3'-phosphate
  modified_base 16: mod_base = OTHER; note = 2'-O-methyluridine-3'-phosphate
  modified_base 17: mod_base = OTHER; note = 2'-O-methylguanosine-3'-phosphate
  modified_base 18: mod_base = OTHER; note = 2'-O-methylguanosine-3'-phosphate
  modified_base 19: mod_base = OTHER; note = 2'-O-methyluridine-3'-phosphate
  modified_base 20: mod_base = OTHER; note = 2'-O-methyluridine-3'-phosphate
  modified_base 21: mod_base = OTHER; note = 2'-O-methyluridine-3'-phosphate ((2S,4R)-1-[29-[[2-(acetylamino)-2-deoxy-beta-D-galactopyra nosyl]oxy]-14,14-bis[[3-[[3-[[5-[[2-(acetylamino)-2-deoxy-b eta-D-galactopyranosyl]oxy]-1-oxopentyl]amino]propyl]amino] -3-oxopropoxy]methyl]-1,12,19,25-tetraoxo-16-oxa-13,20,24-t riazanonacos-1-yl]-4-hydroxy-2-pyrrolidinyl)methyl ester
tttccttggtacaggtggttt

SEQ ID NO: 1793 - RNA, 21 nt, synthetic construct
  source 1..21: mol_type = other RNA
  modified_base 1: mod_base = OTHER; note = 2'-O-methyluridine-3'-phosphorothioate
  modified_base 2: mod_base = OTHER; note = 2'-O-methyluridine-3'-phosphorothioate
  modified_base 3: mod_base = OTHER; note = 2'-O-methylguanosine-3'-phosphate
  modified_base 4: mod_base = OTHER; note = 2'-O-methylguanosine-3'-phosphate
  modified_base 5: mod_base = OTHER; note = 2'-O-methyluridine-3'-phosphate
  modified_base 6: mod_base = OTHER; note = 2'-O-methyladenosine-3'-phosphate
  modified_base 7: mod_base = OTHER; note = 2'-deoxy-2'-fluorocytidine-3'-phosphate
  modified_base 8: mod_base = OTHER; note = 2'-O-methyladenosine-3'-phosphate
  modified_base 9: mod_base = OTHER; note = 2'-deoxy-2'-fluoroguanosine-3'-phosphate
  modified_base 10: mod_base = OTHER; note = 2'-deoxy-2'-fluoroguanosine-3'-phosphate
  modified_base 11: mod_base = OTHER; note = 2'-deoxy-2'-fluorouridine-3'-phosphate
  modified_base 12: mod_base = OTHER; note = 2'-O-methylguanosine-3'-phosphate
  modified_base 13: mod_base = OTHER; note = 2'-O-methylguanosine-3'-phosphate
  modified_base 14: mod_base = OTHER; note = 2'-O-methyluridine-3'-phosphate
  modified_base 15: mod_base = OTHER; note = 2'-O-methyluridine-3'-phosphate
  modified_base 16: mod_base = OTHER; note = 2'-O-methylcytidine-3'-phosphate
  modified_base 17: mod_base = OTHER; note = 2'-O-methyluridine-3'-phosphate
  modified_base 18: mod_base = OTHER; note = 2'-O-methylcytidine-3'-phosphate
  modified_base 19: mod_base = OTHER; note = 2'-O-methyluridine-3'-phosphate
  modified_base 20: mod_base = OTHER; note = 2'-O-methylcytidine-3'-phosphate
  modified_base 21: mod_base = OTHER; note = 2'-O-methyluridine-3'-phosphate ((2S,4R)-1-[29-[[2-(acetylamino)-2-deoxy-beta-D-galactopyra nosyl]oxy]-14,14-bis[[3-[[3-[[5-[[2-(acetylamino)-2-deoxy-b eta-D-galactopyranosyl]oxy]-1-oxopentyl]amino]propyl]amino] -3-oxopropoxy]methyl]-1,12,19,25-tetraoxo-16-oxa-13,20,24-t riazanonacos-1-yl]-4-hydroxy-2-pyrrolidinyl)methyl ester
ttggtacaggtggttctctct

SEQ ID NO: 1794 - RNA, 21 nt, synthetic construct
  source 1..21: mol_type = other RNA
  modified_base 1: mod_base = OTHER; note = 2'-O-methylguanosine-3'-phosphorothioate
  modified_base 2: mod_base = OTHER; note = 2'-O-methyluridine-3'-phosphorothioate
  modified_base 3: mod_base = OTHER; note = 2'-O-methylguanosine-3'-phosphate
  modified_base 4: mod_base = OTHER; note = 2'-O-methylguanosine-3'-phosphate
  modified_base 5: mod_base = OTHER; note = 2'-O-methyluridine-3'-phosphate
  modified_base 6: mod_base = OTHER; note = 2'-O-methyluridine-3'-phosphate
  modified_base 7: mod_base = OTHER; note = 2'-deoxy-2'-fluorocytidine-3'-phosphate
  modified_base 8: mod_base = OTHER; note = 2'-O-methyluridine-3'-phosphate
  modified_base 9: mod_base = OTHER; note = 2'-deoxy-2'-fluorocytidine-3'-phosphate
  modified_base 10: mod_base = OTHER; note = 2'-deoxy-2'-fluorouridine-3'-phosphate
  modified_base 11: mod_base = OTHER; note = 2'-deoxy-2'-fluorocytidine-3'-phosphate
  modified_base 12: mod_base = OTHER; note = 2'-O-methylcytidine-3'-phosphate
  modified_base 13: mod_base = OTHER; note = 2'-O-methyladenosine-3'-phosphate
  modified_base 14: mod_base = OTHER; note = 2'-O-methylguanosine-3'-phosphate
  modified_base 15: mod_base = OTHER; note = 2'-O-methylcytidine-3'-phosphate
  modified_base 16: mod_base = OTHER; note = 2'-O-methyladenosine-3'-phosphate
  modified_base 17: mod_base = OTHER; note = 2'-O-methyladenosine-3'-phosphate
  modified_base 18: mod_base = OTHER; note = 2'-O-methyluridine-3'-phosphate
  modified_base 19: mod_base = OTHER; note = 2'-O-methylguanosine-3'-phosphate
  modified_base 20: mod_base = OTHER; note = 2'-O-methylguanosine-3'-phosphate
  modified_base 21: mod_base = OTHER; note = 2'-O-methyluridine-3'-phosphate ((2S,4R)-1-[29-[[2-(acetylamino)-2-deoxy-beta-D-galactopyra nosyl]oxy]-14,14-bis[[3-[[3-[[5-[[2-(acetylamino)-2-deoxy-b eta-D-galactopyranosyl]oxy]-1-oxopentyl]amino]propyl]amino] -3-oxopropoxy]methyl]-1,12,19,25-tetraoxo-16-oxa-13,20,24-t riazanonacos-1-yl]-4-hydroxy-2-pyrrolidinyl)methyl ester
gtggttctctccagcaatggt

SEQ ID NO: 1795 - RNA, 21 nt, synthetic construct
  source 1..21: mol_type = other RNA
  modified_base 1: mod_base = OTHER; note = 2'-O-methyluridine-3'-phosphorothioate
  modified_base 2: mod_base = OTHER; note = 2'-O-methylcytidine-3'-phosphorothioate
  modified_base 3: mod_base = OTHER; note = 2'-O-methyluridine-3'-phosphate
  modified_base 4: mod_base = OTHER; note = 2'-O-methylcytidine-3'-phosphate
  modified_base 5: mod_base = OTHER; note = 2'-O-methylcytidine-3'-phosphate
  modified_base 6: mod_base = OTHER; note = 2'-O-methyladenosine-3'-phosphate
  modified_base 7: mod_base = OTHER; note = 2'-deoxy-2'-fluoroguanosine-3'-phosphate
  modified_base 8: mod_base = OTHER; note = 2'-O-methylcytidine-3'-phosphate
  modified_base 9: mod_base = OTHER; note = 2'-deoxy-2'-fluoroadenosine-3'-phosphate
  modified_base 10: mod_base = OTHER; note = 2'-deoxy-2'-fluoroadenosine-3'-phosphate
  modified_base 11: mod_base = OTHER; note = 2'-deoxy-2'-fluorouridine-3'-phosphate
  modified_base 12: mod_base = OTHER; note = 2'-O-methylguanosine-3'-phosphate
  modified_base 13: mod_base = OTHER; note = 2'-O-methylguanosine-3'-phosphate
  modified_base 14: mod_base = OTHER; note = 2'-O-methylguanosine-3'-phosphate
  modified_base 15: mod_base = OTHER; note = 2'-O-methyladenosine-3'-phosphate
  modified_base 16: mod_base = OTHER; note = 2'-O-methylguanosine-3'-phosphate
  modified_base 17: mod_base = OTHER; note = 2'-O-methylcytidine-3'-phosphate
  modified_base 18: mod_base = OTHER; note = 2'-O-methyluridine-3'-phosphate
  modified_base 19: mod_base = OTHER; note = 2'-O-methyluridine-3'-phosphate
  modified_base 20: mod_base = OTHER; note = 2'-O-methylcytidine-3'-phosphate
  modified_base 21: mod_base = OTHER; note = 2'-O-methyluridine-3'-phosphate ((2S,4R)-1-[29-[[2-(acetylamino)-2-deoxy-beta-D-galactopyra nosyl]oxy]-14,14-bis[[3-[[3-[[5-[[2-(acetylamino)-2-deoxy-b eta-D-galactopyranosyl]oxy]-1-oxopentyl]amino]propyl]amino] -3-oxopropoxy]methyl]-1,12,19,25-tetraoxo-16-oxa-13,20,24-t riazanonacos-1-yl]-4-hydroxy-2-pyrrolidinyl)methyl ester
tctccagcaatgggagcttct

SEQ ID NO: 1796 - RNA, 21 nt, synthetic construct
  source 1..21: mol_type = other RNA
  modified_base 1: mod_base = OTHER; note = 2'-O-methyladenosine-3'-phosphorothioate
  modified_base 2: mod_base = OTHER; note = 2'-O-methyladenosine-3'-phosphorothioate
  modified_base 3: mod_base = OTHER; note = 2'-O-methyluridine-3'-phosphate
  modified_base 4: mod_base = OTHER; note = 2'-O-methylguanosine-3'-phosphate
  modified_base 5: mod_base = OTHER; note = 2'-O-methylguanosine-3'-phosphate
  modified_base 6: mod_base = OTHER; note = 2'-O-methylguanosine-3'-phosphate
  modified_base 7: mod_base = OTHER; note = 2'-deoxy-2'-fluoroadenosine-3'-phosphate
  modified_base 8: mod_base = OTHER; note = 2'-O-methylguanosine-3'-phosphate
  modified_base 9: mod_base = OTHER; note = 2'-deoxy-2'-fluorocytidine-3'-phosphate
  modified_base 10: mod_base = OTHER; note = 2'-deoxy-2'-fluorouridine-3'-phosphate
  modified_base 11: mod_base = OTHER; note = 2'-deoxy-2'-fluorouridine-3'-phosphate
  modified_base 12: mod_base = OTHER; note = 2'-O-methylcytidine-3'-phosphate
  modified_base 13: mod_base = OTHER; note = 2'-O-methyladenosine-3'-phosphate
  modified_base 14: mod_base = OTHER; note = 2'-O-methyluridine-3'-phosphate
  modified_base 15: mod_base = OTHER; note = 2'-O-methyluridine-3'-phosphate
  modified_base 16: mod_base = OTHER; note = 2'-O-methylcytidine-3'-phosphate
  modified_base 17: mod_base = OTHER; note = 2'-O-methyluridine-3'-phosphate
  modified_base 18: mod_base = OTHER; note = 2'-O-methyluridine-3'-phosphate
  modified_base 19: mod_base = OTHER; note = 2'-O-methyluridine-3'-phosphate
  modified_base 20: mod_base = OTHER; note = 2'-O-methyladenosine-3'-phosphate
  modified_base 21: mod_base = OTHER; note = 2'-O-methyluridine-3'-phosphate ((2S,4R)-1-[29-[[2-(acetylamino)-2-deoxy-beta-D-galactopyra nosyl]oxy]-14,14-bis[[3-[[3-[[5-[[2-(acetylamino)-2-deoxy-b eta-D-galactopyranosyl]oxy]-1-oxopentyl]amino]propyl]amino] -3-oxopropoxy]methyl]-1,12,19,25-tetraoxo-16-oxa-13,20,24-t riazanonacos-1-yl]-4-hydroxy-2-pyrrolidinyl)methyl ester
aatgggagcttcattctttat

SEQ ID NO: 1797 - RNA, 21 nt, synthetic construct
  source 1..21: mol_type = other RNA
  modified_base 1: mod_base = OTHER; note = 2'-O-methyluridine-3'-phosphorothioate
  modified_base 2: mod_base = OTHER; note = 2'-O-methyluridine-3'-phosphorothioate
  modified_base 3: mod_base = OTHER; note = 2'-O-methylcytidine-3'-phosphate
  modified_base 4: mod_base = OTHER; note = 2'-O-methyladenosine-3'-phosphate
  modified_base 5: mod_base = OTHER; note = 2'-O-methyluridine-3'-phosphate
  modified_base 6: mod_base = OTHER; note = 2'-O-methyluridine-3'-phosphate
  modified_base 7: mod_base = OTHER; note = 2'-deoxy-2'-fluorocytidine-3'-phosphate
  modified_base 8: mod_base = OTHER; note = 2'-O-methyluridine-3'-phosphate
  modified_base 9: mod_base = OTHER; note = 2'-deoxy-2'-fluorouridine-3'-phosphate
  modified_base 10: mod_base = OTHER; note = 2'-deoxy-2'-fluorouridine-3'-phosphate
  modified_base 11: mod_base = OTHER; note = 2'-deoxy-2'-fluoroadenosine-3'-phosphate
  modified_base 12: mod_base = OTHER; note = 2'-O-methylcytidine-3'-phosphate
  modified_base 13: mod_base = OTHER; note = 2'-O-methylcytidine-3'-phosphate
  modified_base 14: mod_base = OTHER; note = 2'-O-methyladenosine-3'-phosphate
  modified_base 15: mod_base = OTHER; note = 2'-O-methylguanosine-3'-phosphate
  modified_base 16: mod_base = OTHER; note = 2'-O-methyluridine-3'-phosphate
  modified_base 17: mod_base = OTHER; note = 2'-O-methyluridine-3'-phosphate
  modified_base 18: mod_base = OTHER; note = 2'-O-methyluridine-3'-phosphate
  modified_base 19: mod_base = OTHER; note = 2'-O-methylguanosine-3'-phosphate
  modified_base 20: mod_base = OTHER; note = 2'-O-methyladenosine-3'-phosphate
  modified_base 21: mod_base = OTHER; note = 2'-O-methyluridine-3'-phosphate ((2S,4R)-1-[29-[[2-(acetylamino)-2-deoxy-beta-D-galactopyra nosyl]oxy]-14,14-bis[[3-[[3-[[5-[[2-(acetylamino)-2-deoxy-b eta-D-galactopyranosyl]oxy]-1-oxopentyl]amino]propyl]amino] -3-oxopropoxy]methyl]-1,12,19,25-tetraoxo-16-oxa-13,20,24-t riazanonacos-1-yl]-4-hydroxy-2-pyrrolidinyl)methyl ester
ttcattctttaccagtttgat

SEQ ID NO: 1798 - RNA, 21 nt, synthetic construct
  source 1..21: mol_type = other RNA
  modified_base 1: mod_base = OTHER; note = 2'-O-methylcytidine-3'-phosphorothioate
  modified_base 2: mod_base = OTHER; note = 2'-O-methyluridine-3'-phosphorothioate
  modified_base 3: mod_base = OTHER; note = 2'-O-methyluridine-3'-phosphate
  modified_base 4: mod_base = OTHER; note = 2'-O-methyluridine-3'-phosphate
  modified_base 5: mod_base = OTHER; note = 2'-O-methyladenosine-3'-phosphate
  modified_base 6: mod_base = OTHER; note = 2'-O-methylcytidine-3'-phosphate
  modified_base 7: mod_base = OTHER; note = 2'-deoxy-2'-fluorocytidine-3'-phosphate
  modified_base 8: mod_base = OTHER; note = 2'-O-methyladenosine-3'-phosphate
  modified_base 9: mod_base = OTHER; note = 2'-deoxy-2'-fluoroguanosine-3'-phosphate
  modified_base 10: mod_base = OTHER; note = 2'-deoxy-2'-fluorouridine-3'-phosphate
  modified_base 11: mod_base = OTHER; note = 2'-deoxy-2'-fluorouridine-3'-phosphate
  modified_base 12: mod_base = OTHER; note = 2'-O-methyluridine-3'-phosphate
  modified_base 13: mod_base = OTHER; note = 2'-O-methylguanosine-3'-phosphate
  modified_base 14: mod_base = OTHER; note = 2'-O-methyladenosine-3'-phosphate
  modified_base 15: mod_base = OTHER; note = 2'-O-methyladenosine-3'-phosphate
  modified_base 16: mod_base = OTHER; note = 2'-O-methyluridine-3'-phosphate
  modified_base 17: mod_base = OTHER; note = 2'-O-methyluridine-3'-phosphate
  modified_base 18: mod_base = OTHER; note = 2'-O-methylguanosine-3'-phosphate
  modified_base 19: mod_base = OTHER; note = 2'-O-methyluridine-3'-phosphate
  modified_base 20: mod_base = OTHER; note = 2'-O-methyluridine-3'-phosphate
  modified_base 21: mod_base = OTHER; note = 2'-O-methyluridine-3'-phosphate ((2S,4R)-1-[29-[[2-(acetylamino)-2-deoxy-beta-D-galactopyra nosyl]oxy]-14,14-bis[[3-[[3-[[5-[[2-(acetylamino)-2-deoxy-b eta-D-galactopyranosyl]oxy]-1-oxopentyl]amino]propyl]amino] -3-oxopropoxy]methyl]-1,12,19,25-tetraoxo-16-oxa-13,20,24-t riazanonacos-1-yl]-4-hydroxy-2-pyrrolidinyl)methyl ester
ctttaccagtttgaattgttt

SEQ ID NO: 1799 - RNA, 21 nt, synthetic construct
  source 1..21: mol_type = other RNA
  modified_base 1: mod_base = OTHER; note = 2'-O-methylcytidine-3'-phosphorothioate
  modified_base 2: mod_base = OTHER; note = 2'-O-methyladenosine-3'-phosphorothioate
  modified_base 3: mod_base = OTHER; note = 2'-O-methylguanosine-3'-phosphate
  modified_base 4: mod_base = OTHER; note = 2'-O-methyluridine-3'-phosphate
  modified_base 5: mod_base = OTHER; note = 2'-O-methyluridine-3'-phosphate
  modified_base 6: mod_base = OTHER; note = 2'-O-methyluridine-3'-phosphate
  modified_base 7: mod_base = OTHER; note = 2'-deoxy-2'-fluoroguanosine-3'-phosphate
  modified_base 8: mod_base = OTHER; note = 2'-O-methyladenosine-3'-phosphate
  modified_base 9: mod_base = OTHER; note = 2'-deoxy-2'-fluoroadenosine-3'-phosphate
  modified_base 10: mod_base = OTHER; note = 2'-deoxy-2'-fluorouridine-3'-phosphate
  modified_base 11: mod_base = OTHER; note = 2'-deoxy-2'-fluorouridine-3'-phosphate
  modified_base 12: mod_base = OTHER; note = 2'-O-methylguanosine-3'-phosphate
  modified_base 13: mod_base = OTHER; note = 2'-O-methyluridine-3'-phosphate
  modified_base 14: mod_base = OTHER; note = 2'-O-methyluridine-3'-phosphate
  modified_base 15: mod_base = OTHER; note = 2'-O-methyluridine-3'-phosphate
  modified_base 16: mod_base = OTHER; note = 2'-O-methylguanosine-3'-phosphate
  modified_base 17: mod_base = OTHER; note = 2'-O-methylguanosine-3'-phosphate
  modified_base 18: mod_base = OTHER; note = 2'-O-methyladenosine-3'-phosphate
  modified_base 19: mod_base = OTHER; note = 2'-O-methyluridine-3'-phosphate
  modified_base 20: mod_base = OTHER; note = 2'-O-methyluridine-3'-phosphate
  modified_base 21: mod_base = OTHER; note = 2'-O-methyluridine-3'-phosphate ((2S,4R)-1-[29-[[2-(acetylamino)-2-deoxy-beta-D-galactopyra nosyl]oxy]-14,14-bis[[3-[[3-[[5-[[2-(acetylamino)-2-deoxy-b eta-D-galactopyranosyl]oxy]-1-oxopentyl]amino]propyl]amino] -3-oxopropoxy]methyl]-1,12,19,25-tetraoxo-16-oxa-13,20,24-t riazanonacos-1-yl]-4-hydroxy-2-pyrrolidinyl)methyl ester
cagtttgaattgtttggattt

SEQ ID NO: 1800 - RNA, 21 nt, synthetic construct
  source 1..21: mol_type = other RNA
  modified_base 1: mod_base = OTHER; note = 2'-O-methyladenosine-3'-phosphorothioate
  modified_base 2: mod_base = OTHER; note = 2'-O-methyladenosine-3'-phosphorothioate
  modified_base 3: mod_base = OTHER; note = 2'-O-methyluridine-3'-phosphate
  modified_base 4: mod_base = OTHER; note = 2'-O-methyluridine-3'-phosphate
  modified_base 5: mod_base = OTHER; note = 2'-O-methylguanosine-3'-phosphate
  modified_base 6: mod_base = OTHER; note = 2'-O-methyluridine-3'-phosphate
  modified_base 7: mod_base = OTHER; note = 2'-deoxy-2'-fluorouridine-3'-phosphate
  modified_base 8: mod_base = OTHER; note = 2'-O-methyluridine-3'-phosphate
  modified_base 9: mod_base = OTHER; note = 2'-deoxy-2'-fluoroguanosine-3'-phosphate
  modified_base 10: mod_base = OTHER; note = 2'-deoxy-2'-fluoroguanosine-3'-phosphate
  modified_base 11: mod_base = OTHER; note = 2'-deoxy-2'-fluoroadenosine-3'-phosphate
  modified_base 12: mod_base = OTHER; note = 2'-O-methyluridine-3'-phosphate
  modified_base 13: mod_base = OTHER; note = 2'-O-methyluridine-3'-phosphate
  modified_base 14: mod_base = OTHER; note = 2'-O-methyluridine-3'-phosphate
  modified_base 15: mod_base = OTHER; note = 2'-O-methyladenosine-3'-phosphate
  modified_base 16: mod_base = OTHER; note = 2'-O-methylcytidine-3'-phosphate
  modified_base 17: mod_base = OTHER; note = 2'-O-methyluridine-3'-phosphate
  modified_base 18: mod_base = OTHER; note = 2'-O-methylcytidine-3'-phosphate
  modified_base 19: mod_base = OTHER; note = 2'-O-methyluridine-3'-phosphate
  modified_base 20: mod_base = OTHER; note = 2'-O-methyluridine-3'-phosphate
  modified_base 21: mod_base = OTHER; note = 2'-O-methyluridine-3'-phosphate ((2S,4R)-1-[29-[[2-(acetylamino)-2-deoxy-beta-D-galactopyra nosyl]oxy]-14,14-bis[[3-[[3-[[5-[[2-(acetylamino)-2-deoxy-b eta-D-galactopyranosyl]oxy]-1-oxopentyl]amino]propyl]amino] -3-oxopropoxy]methyl]-1,12,19,25-tetraoxo-16-oxa-13,20,24-t riazanonacos-1-yl]-4-hydroxy-2-pyrrolidinyl)methyl ester
aattgtttggatttactcttt

SEQ ID NO: 1801 - RNA, 21 nt, synthetic construct
  source 1..21: mol_type = other RNA
  modified_base 1: mod_base = OTHER; note = 2'-O-methyluridine-3'-phosphorothioate
  modified_base 2: mod_base = OTHER; note = 2'-O-methylcytidine-3'-phosphorothioate
  modified_base 3: mod_base = OTHER; note = 2'-O-methyluridine-3'-phosphate
  modified_base 4: mod_base = OTHER; note = 2'-O-methyluridine-3'-phosphate
  modified_base 5: mod_base = OTHER; note = 2'-O-methyladenosine-3'-phosphate
  modified_base 6: mod_base = OTHER; note = 2'-O-methyluridine-3'-phosphate
  modified_base 7: mod_base = OTHER; note = 2'-deoxy-2'-fluoroadenosine-3'-phosphate
  modified_base 8: mod_base = OTHER; note = 2'-O-methyluridine-3'-phosphate
  modified_base 9: mod_base = OTHER; note = 2'-deoxy-2'-fluorouridine-3'-phosphate
  modified_base 10: mod_base = OTHER; note = 2'-deoxy-2'-fluorouridine-3'-phosphate
  modified_base 11: mod_base = OTHER; note = 2'-deoxy-2'-fluorouridine-3'-phosphate
  modified_base 12: mod_base = OTHER; note = 2'-O-methyluridine-3'-phosphate
  modified_base 13: mod_base = OTHER; note = 2'-O-methylcytidine-3'-phosphate
  modified_base 14: mod_base = OTHER; note = 2'-O-methyladenosine-3'-phosphate
  modified_base 15: mod_base = OTHER; note = 2'-O-methyladenosine-3'-phosphate
  modified_base 16: mod_base = OTHER; note = 2'-O-methylguanosine-3'-phosphate
  modified_base 17: mod_base = OTHER; note = 2'-O-methyluridine-3'-phosphate
  modified_base 18: mod_base = OTHER; note = 2'-O-methylcytidine-3'-phosphate
  modified_base 19: mod_base = OTHER; note = 2'-O-methyladenosine-3'-phosphate
  modified_base 20: mod_base = OTHER; note = 2'-O-methylguanosine-3'-phosphate
  modified_base 21: mod_base = OTHER; note = 2'-O-methyluridine-3'-phosphate ((2S,4R)-1-[29-[[2-(acetylamino)-2-deoxy-beta-D-galactopyra nosyl]oxy]-14,14-bis[[3-[[3-[[5-[[2-(acetylamino)-2-deoxy-b eta-D-galactopyranosyl]oxy]-1-oxopentyl]amino]propyl]amino] -3-oxopropoxy]methyl]-1,12,19,25-tetraoxo-16-oxa-13,20,24-t riazanonacos-1-yl]-4-hydroxy-2-pyrrolidinyl)methyl ester
tcttatatttttcaagtcagt

SEQ ID NO: 1802 - RNA, 21 nt, synthetic construct
  source 1..21: mol_type = other RNA
  modified_base 1: mod_base = OTHER; note = 2'-O-methyluridine-3'-phosphorothioate
  modified_base 2: mod_base = OTHER; note = 2'-O-methyluridine-3'-phosphorothioate
  modified_base 3: mod_base = OTHER; note = 2'-O-methyluridine-3'-phosphate
  modified_base 4: mod_base = OTHER; note = 2'-O-methylcytidine-3'-phosphate
  modified_base 5: mod_base = OTHER; note = 2'-O-methyladenosine-3'-phosphate
  modified_base 6: mod_base = OTHER; note = 2'-O-methyladenosine-3'-phosphate
  modified_base 7: mod_base = OTHER; note = 2'-deoxy-2'-fluoroguanosine-3'-phosphate
  modified_base 8: mod_base = OTHER; note = 2'-O-methyluridine-3'-phosphate
  modified_base 9: mod_base = OTHER; note = 2'-deoxy-2'-fluorocytidine-3'-phosphate
  modified_base 10: mod_base = OTHER; note = 2'-deoxy-2'-fluoroadenosine-3'-phosphate
  modified_base 11: mod_base = OTHER; note = 2'-deoxy-2'-fluoroguanosine-3'-phosphate
  modified_base 12: mod_base = OTHER; note = 2'-O-methylguanosine-3'-phosphate
  modified_base 13: mod_base = OTHER; note = 2'-O-methyladenosine-3'-phosphate
  modified_base 14: mod_base = OTHER; note = 2'-O-methyluridine-3'-phosphate
  modified_base 15: mod_base = OTHER; note = 2'-O-methyluridine-3'-phosphate
  modified_base 16: mod_base = OTHER; note = 2'-O-methyladenosine-3'-phosphate
  modified_base 17: mod_base = OTHER; note = 2'-O-methyladenosine-3'-phosphate
  modified_base 18: mod_base = OTHER; note = 2'-O-methyladenosine-3'-phosphate
  modified_base 19: mod_base = OTHER; note = 2'-O-methylcytidine-3'-phosphate
  modified_base 20: mod_base = OTHER; note = 2'-O-methylcytidine-3'-phosphate
  modified_base 21: mod_base = OTHER; note = 2'-O-methyluridine-3'-phosphate ((2S,4R)-1-[29-[[2-(acetylamino)-2-deoxy-beta-D-galactopyra nosyl]oxy]-14,14-bis[[3-[[3-[[5-[[2-(acetylamino)-2-deoxy-b eta-D-galactopyranosyl]oxy]-1-oxopentyl]amino]propyl]amino] -3-oxopropoxy]methyl]-1,12,19,25-tetraoxo-16-oxa-13,20,24-t riazanonacos-1-yl]-4-hydroxy-2-pyrrolidinyl)methyl ester
tttcaagtcaggattaaacct

SEQ ID NO: 1803 - RNA, 21 nt, synthetic construct
  source 1..21: mol_type = other RNA
  modified_base 1: mod_base = OTHER; note = 2'-O-methylguanosine-3'-phosphorothioate
  modified_base 2: mod_base = OTHER; note = 2'-O-methyluridine-3'-phosphorothioate
  modified_base 3: mod_base = OTHER; note = 2'-O-methylcytidine-3'-phosphate
  modified_base 4: mod_base = OTHER; note = 2'-O-methyladenosine-3'-phosphate
  modified_base 5: mod_base = OTHER; note = 2'-O-methylguanosine-3'-phosphate
  modified_base 6: mod_base = OTHER; note = 2'-O-methylguanosine-3'-phosphate
  modified_base 7: mod_base = OTHER; note = 2'-deoxy-2'-fluoroadenosine-3'-phosphate
  modified_base 8: mod_base = OTHER; note = 2'-O-methyluridine-3'-phosphate
  modified_base 9: mod_base = OTHER; note = 2'-deoxy-2'-fluorouridine-3'-phosphate
  modified_base 10: mod_base = OTHER; note = 2'-deoxy-2'-fluoroadenosine-3'-phosphate
  modified_base 11: mod_base = OTHER; note = 2'-deoxy-2'-fluoroadenosine-3'-phosphate
  modified_base 12: mod_base = OTHER; note = 2'-O-methyladenosine-3'-phosphate
  modified_base 13: mod_base = OTHER; note = 2'-O-methylcytidine-3'-phosphate
  modified_base 14: mod_base = OTHER; note = 2'-O-methylcytidine-3'-phosphate
  modified_base 15: mod_base = OTHER; note = 2'-O-methylcytidine-3'-phosphate
  modified_base 16: mod_base = OTHER; note = 2'-O-methyluridine-3'-phosphate
  modified_base 17: mod_base = OTHER; note = 2'-O-methyluridine-3'-phosphate
  modified_base 18: mod_base = OTHER; note = 2'-O-methyluridine-3'-phosphate
  modified_base 19: mod_base = OTHER; note = 2'-O-methyluridine-3'-phosphate
  modified_base 20: mod_base = OTHER; note = 2'-O-methyladenosine-3'-phosphate
  modified_base 21: mod_base = OTHER; note = 2'-O-methyluridine-3'-phosphate ((2S,4R)-1-[29-[[2-(acetylamino)-2-deoxy-beta-D-galactopyra nosyl]oxy]-14,14-bis[[3-[[3-[[5-[[2-(acetylamino)-2-deoxy-b eta-D-galactopyranosyl]oxy]-1-oxopentyl]amino]propyl]amino] -3-oxopropoxy]methyl]-1,12,19,25-tetraoxo-16-oxa-13,20,24-t riazanonacos-1-yl]-4-hydroxy-2-pyrrolidinyl)methyl ester
gtcaggattaaacccttttat

SEQ ID NO: 1804 - RNA, 21 nt, synthetic construct
  source 1..21: mol_type = other RNA
  modified_base 1: mod_base = OTHER; note = 2'-O-methyladenosine-3'-phosphorothioate
  modified_base 2: mod_base = OTHER; note = 2'-O-methyladenosine-3'-phosphorothioate
  modified_base 3: mod_base = OTHER; note = 2'-O-methylcytidine-3'-phosphate
  modified_base 4: mod_base = OTHER; note = 2'-O-methylcytidine-3'-phosphate
  modified_base 5: mod_base = OTHER; note = 2'-O-methylcytidine-3'-phosphate
  modified_base 6: mod_base = OTHER; note = 2'-O-methyluridine-3'-phosphate
  modified_base 7: mod_base = OTHER; note = 2'-deoxy-2'-fluorouridine-3'-phosphate
  modified_base 8: mod_base = OTHER; note = 2'-O-methyluridine-3'-phosphate
  modified_base 9: mod_base = OTHER; note = 2'-deoxy-2'-fluorouridine-3'-phosphate
  modified_base 10: mod_base = OTHER; note = 2'-deoxy-2'-fluoroadenosine-3'-phosphate
  modified_base 11: mod_base = OTHER; note = 2'-deoxy-2'-fluorouridine-3'-phosphate
  modified_base 12: mod_base = OTHER; note = 2'-O-methyladenosine-3'-phosphate
  modified_base 13: mod_base = OTHER; note = 2'-O-methyluridine-3'-phosphate
  modified_base 14: mod_base = OTHER; note = 2'-O-methyladenosine-3'-phosphate
  modified_base 15: mod_base = OTHER; note = 2'-O-methyluridine-3'-phosphate
  modified_base 16: mod_base = OTHER; note = 2'-O-methyluridine-3'-phosphate
  modified_base 17: mod_base = OTHER; note = 2'-O-methylcytidine-3'-phosphate
  modified_base 18: mod_base = OTHER; note = 2'-O-methyluridine-3'-phosphate
  modified_base 19: mod_base = OTHER; note = 2'-O-methylcytidine-3'-phosphate
  modified_base 20: mod_base = OTHER; note = 2'-O-methylguanosine-3'-phosphate
  modified_base 21: mod_base = OTHER; note = 2'-O-methyluridine-3'-phosphate ((2S,4R)-1-[29-[[2-(acetylamino)-2-deoxy-beta-D-galactopyra nosyl]oxy]-14,14-bis[[3-[[3-[[5-[[2-(acetylamino)-2-deoxy-b eta-D-galactopyranosyl]oxy]-1-oxopentyl]amino]propyl]amino] -3-oxopropoxy]methyl]-1,12,19,25-tetraoxo-16-oxa-13,20,24-t riazanonacos-1-yl]-4-hydroxy-2-pyrrolidinyl)methyl ester
aacccttttatatattctcgt

SEQ ID NO: 1805 - RNA, 21 nt, synthetic construct
  source 1..21: mol_type = other RNA
  modified_base 1: mod_base = OTHER; note = 2'-O-methyluridine-3'-phosphorothioate
  modified_base 2: mod_base = OTHER; note = 2'-O-methyluridine-3'-phosphorothioate
  modified_base 3: mod_base = OTHER; note = 2'-O-methyluridine-3'-phosphate
  modified_base 4: mod_base = OTHER; note = 2'-O-methyluridine-3'-phosphate
  modified_base 5: mod_base = OTHER; note = 2'-O-methyladenosine-3'-phosphate
  modified_base 6: mod_base = OTHER; note = 2'-O-methyluridine-3'-phosphate
  modified_base 7: mod_base = OTHER; note = 2'-deoxy-2'-fluoroadenosine-3'-phosphate
  modified_base 8: mod_base = OTHER; note = 2'-O-methyluridine-3'-phosphate
  modified_base 9: mod_base = OTHER; note = 2'-deoxy-2'-fluoroadenosine-3'-phosphate
  modified_base 10: mod_base = OTHER; note = 2'-deoxy-2'-fluorouridine-3'-phosphate
  modified_base 11: mod_base = OTHER; note = 2'-deoxy-2'-fluorouridine-3'-phosphate
  modified_base 12: mod_base = OTHER; note = 2'-O-methylcytidine-3'-phosphate
  modified_base 13: mod_base = OTHER; note = 2'-O-methyluridine-3'-phosphate
  modified_base 14: mod_base = OTHER; note = 2'-O-methylcytidine-3'-phosphate
  modified_base 15: mod_base = OTHER; note = 2'-O-methylguanosine-3'-phosphate
  modified_base 16: mod_base = OTHER; note = 2'-O-methylguanosine-3'-phosphate
  modified_base 17: mod_base = OTHER; note = 2'-O-methyladenosine-3'-phosphate
  modified_base 18: mod_base = OTHER; note = 2'-O-methyladenosine-3'-phosphate
  modified_base 19: mod_base = OTHER; note = 2'-O-methylcytidine-3'-phosphate
  modified_base 20: mod_base = OTHER; note = 2'-O-methyladenosine-3'-phosphate
  modified_base 21: mod_base = OTHER; note = 2'-O-methyluridine-3'-phosphate ((2S,4R)-1-[29-[[2-(acetylamino)-2-deoxy-beta-D-galactopyra nosyl]oxy]-14,14-bis[[3-[[3-[[5-[[2-(acetylamino)-2-deoxy-b eta-D-galactopyranosyl]oxy]-1-oxopentyl]amino]propyl]amino] -3-oxopropoxy]methyl]-1,12,19,25-tetraoxo-16-oxa-13,20,24-t riazanonacos-1-yl]-4-hydroxy-2-pyrrolidinyl)methyl ester
ttttatatattctcggaacat

SEQ ID NO: 1806 - RNA, 21 nt, synthetic construct
  source 1..21: mol_type = other RNA
  modified_base 1: mod_base = OTHER; note = 2'-O-methyluridine-3'-phosphorothioate
  modified_base 2: mod_base = OTHER; note = 2'-O-methyladenosine-3'-phosphorothioate
  modified_base 3: mod_base = OTHER; note = 2'-O-methyluridine-3'-phosphate
  modified_base 4: mod_base = OTHER; note = 2'-O-methyladenosine-3'-phosphate
  modified_base 5: mod_base = OTHER; note = 2'-O-methyluridine-3'-phosphate
  modified_base 6: mod_base = OTHER; note = 2'-O-methyluridine-3'-phosphate
  modified_base 7: mod_base = OTHER; note = 2'-deoxy-2'-fluorocytidine-3'-phosphate
  modified_base 8: mod_base = OTHER; note = 2'-O-methyluridine-3'-phosphate
  modified_base 9: mod_base = OTHER; note = 2'-deoxy-2'-fluorocytidine-3'-phosphate
  modified_base 10: mod_base = OTHER; note = 2'-deoxy-2'-fluoroguanosine-3'-phosphate
  modified_base 11: mod_base = OTHER; note = 2'-deoxy-2'-fluoroguanosine-3'-phosphate
  modified_base 12: mod_base = OTHER; note = 2'-O-methyladenosine-3'-phosphate
  modified_base 13: mod_base = OTHER; note = 2'-O-methyladenosine-3'-phosphate
  modified_base 14: mod_base = OTHER; note = 2'-O-methylcytidine-3'-phosphate
  modified_base 15: mod_base = OTHER; note = 2'-O-methyladenosine-3'-phosphate
  modified_base 16: mod_base = OTHER; note = 2'-O-methylguanosine-3'-phosphate
  modified_base 17: mod_base = OTHER; note = 2'-O-methyluridine-3'-phosphate
  modified_base 18: mod_base = OTHER; note = 2'-O-methylguanosine-3'-phosphate
  modified_base 19: mod_base = OTHER; note = 2'-O-methylcytidine-3'-phosphate
  modified_base 20: mod_base = OTHER; note = 2'-O-methyladenosine-3'-phosphate
  modified_base 21: mod_base = OTHER; note = 2'-O-methyluridine-3'-phosphate ((2S,4R)-1-[29-[[2-(acetylamino)-2-deoxy-beta-D-galactopyra nosyl]oxy]-14,14-bis[[3-[[3-[[5-[[2-(acetylamino)-2-deoxy-b eta-D-galactopyranosyl]oxy]-1-oxopentyl]amino]propyl]amino] -3-oxopropoxy]methyl]-1,12,19,25-tetraoxo-16-oxa-13,20,24-t riazanonacos-1-yl]-4-hydroxy-2-pyrrolidinyl)methyl ester
tatattctcggaacagtgcat

SEQ ID NO: 1807 - RNA, 21 nt, synthetic construct
  source 1..21: mol_type = other RNA
  modified_base 1: mod_base = OTHER; note = 2'-O-methyluridine-3'-phosphorothioate
  modified_base 2: mod_base = OTHER; note = 2'-O-methylcytidine-3'-phosphorothioate
  modified_base 3: mod_base = OTHER; note = 2'-O-methyluridine-3'-phosphate
  modified_base 4: mod_base = OTHER; note = 2'-O-methylcytidine-3'-phosphate
  modified_base 5: mod_base = OTHER; note = 2'-O-methylguanosine-3'-phosphate
  modified_base 6: mod_base = OTHER; note = 2'-O-methylguanosine-3'-phosphate
  modified_base 7: mod_base = OTHER; note = 2'-deoxy-2'-fluoroadenosine-3'-phosphate
  modified_base 8: mod_base = OTHER; note = 2'-O-methyladenosine-3'-phosphate
  modified_base 9: mod_base = OTHER; note = 2'-deoxy-2'-fluorocytidine-3'-phosphate
  modified_base 10: mod_base = OTHER; note = 2'-deoxy-2'-fluoroadenosine-3'-phosphate
  modified_base 11: mod_base = OTHER; note = 2'-deoxy-2'-fluoroguanosine-3'-phosphate
  modified_base 12: mod_base = OTHER; note = 2'-O-methyluridine-3'-phosphate
  modified_base 13: mod_base = OTHER; note = 2'-O-methylguanosine-3'-phosphate
  modified_base 14: mod_base = OTHER; note = 2'-O-methylcytidine-3'-phosphate
  modified_base 15: mod_base = OTHER; note = 2'-O-methyladenosine-3'-phosphate
  modified_base 16: mod_base = OTHER; note = 2'-O-methylguanosine-3'-phosphate
  modified_base 17: mod_base = OTHER; note = 2'-O-methylguanosine-3'-phosphate
  modified_base 18: mod_base = OTHER; note = 2'-O-methylguanosine-3'-phosphate
  modified_base 19: mod_base = OTHER; note = 2'-O-methylcytidine-3'-phosphate
  modified_base 20: mod_base = OTHER; note = 2'-O-methyluridine-3'-phosphate
  modified_base 21: mod_base = OTHER; note = 2'-O-methyluridine-3'-phosphate ((2S,4R)-1-[29-[[2-(acetylamino)-2-deoxy-beta-D-galactopyra nosyl]oxy]-14,14-bis[[3-[[3-[[5-[[2-(acetylamino)-2-deoxy-b eta-D-galactopyranosyl]oxy]-1-oxopentyl]amino]propyl]amino] -3-oxopropoxy]methyl]-1,12,19,25-tetraoxo-16-oxa-13,20,24-t riazanonacos-1-yl]-4-hydroxy-2-pyrrolidinyl)methyl ester
tctcggaacagtgcagggctt

SEQ ID NO: 1808 - RNA, 21 nt, synthetic construct
  source 1..21: mol_type = other RNA
  modified_base 1: mod_base = OTHER; note = 2'-O-methylguanosine-3'-phosphorothioate
  modified_base 2: mod_base = OTHER; note = 2'-O-methylcytidine-3'-phosphorothioate
  modified_base 3: mod_base = OTHER; note = 2'-O-methyladenosine-3'-phosphate
  modified_base 4: mod_base = OTHER; note = 2'-O-methylguanosine-3'-phosphate
  modified_base 5: mod_base = OTHER; note = 2'-O-methylguanosine-3'-phosphate
  modified_base 6: mod_base = OTHER; note = 2'-O-methylguanosine-3'-phosphate
  modified_base 7: mod_base = OTHER; note = 2'-deoxy-2'-fluorocytidine-3'-phosphate
  modified_base 8: mod_base = OTHER; note = 2'-O-methyluridine-3'-phosphate
  modified_base 9: mod_base = OTHER; note = 2'-deoxy-2'-fluoroguanosine-3'-phosphate
  modified_base 10: mod_base = OTHER; note = 2'-deoxy-2'-fluoroadenosine-3'-phosphate
  modified_base 11: mod_base = OTHER; note = 2'-deoxy-2'-fluoroguanosine-3'-phosphate
  modified_base 12: mod_base = OTHER; note = 2'-O-methyladenosine-3'-phosphate
  modified_base 13: mod_base = OTHER; note = 2'-O-methyladenosine-3'-phosphate
  modified_base 14: mod_base = OTHER; note = 2'-O-methylguanosine-3'-phosphate
  modified_base 15: mod_base = OTHER; note = 2'-O-methylguanosine-3'-phosphate
  modified_base 16: mod_base = OTHER; note = 2'-O-methyladenosine-3'-phosphate
  modified_base 17: mod_base = OTHER; note = 2'-O-methyladenosine-3'-phosphate
  modified_base 18: mod_base = OTHER; note = 2'-O-methyladenosine-3'-phosphate
  modified_base 19: mod_base = OTHER; note = 2'-O-methylguanosine-3'-phosphate
  modified_base 20: mod_base = OTHER; note = 2'-O-methyluridine-3'-phosphate
  modified_base 21: mod_base = OTHER; note = 2'-O-methyluridine-3'-phosphate ((2S,4R)-1-[29-[[2-(acetylamino)-2-deoxy-beta-D-galactopyra nosyl]oxy]-14,14-bis[[3-[[3-[[5-[[2-(acetylamino)-2-deoxy-b eta-D-galactopyranosyl]oxy]-1-oxopentyl]amino]propyl]amino] -3-oxopropoxy]methyl]-1,12,19,25-tetraoxo-16-oxa-13,20,24-t riazanonacos-1-yl]-4-hydroxy-2-pyrrolidinyl)methyl ester
gcagggctgagaaggaaagtt

SEQ ID NO: 1809 - RNA, 21 nt, synthetic construct
  source 1..21: mol_type = other RNA
  modified_base 1: mod_base = OTHER; note = 2'-O-methylguanosine-3'-phosphorothioate
  modified_base 2: mod_base = OTHER; note = 2'-O-methylcytidine-3'-phosphorothioate
  modified_base 3: mod_base = OTHER; note = 2'-O-methyluridine-3'-phosphate
  modified_base 4: mod_base = OTHER; note = 2'-O-methylguanosine-3'-phosphate
  modified_base 5: mod_base = OTHER; note = 2'-O-methyladenosine-3'-phosphate
  modified_base 6: mod_base = OTHER; note = 2'-O-methylguanosine-3'-phosphate
  modified_base 7: mod_base = OTHER; note = 2'-deoxy-2'-fluoroadenosine-3'-phosphate
  modified_base 8: mod_base = OTHER; note = 2'-O-methyladenosine-3'-phosphate
  modified_base 9: mod_base = OTHER; note = 2'-deoxy-2'-fluoroguanosine-3'-phosphate
  modified_base 10: mod_base = OTHER; note = 2'-deoxy-2'-fluoroguanosine-3'-phosphate
  modified_base 11: mod_base = OTHER; note = 2'-deoxy-2'-fluoroadenosine-3'-phosphate
  modified_base 12: mod_base = OTHER; note = 2'-O-methyladenosine-3'-phosphate
  modified_base 13: mod_base = OTHER; note = 2'-O-methyladenosine-3'-phosphate
  modified_base 14: mod_base = OTHER; note = 2'-O-methylguanosine-3'-phosphate
  modified_base 15: mod_base = OTHER; note = 2'-O-methyluridine-3'-phosphate
  modified_base 16: mod_base = OTHER; note = 2'-O-methylguanosine-3'-phosphate
  modified_base 17: mod_base = OTHER; note = 2'-O-methylcytidine-3'-phosphate
  modified_base 18: mod_base = OTHER; note = 2'-O-methyluridine-3'-phosphate
  modified_base 19: mod_base = OTHER; note = 2'-O-methylcytidine-3'-phosphate
  modified_base 20: mod_base = OTHER; note = 2'-O-methyluridine-3'-phosphate
  modified_base 21: mod_base = OTHER; note = 2'-O-methyluridine-3'-phosphate ((2S,4R)-1-[29-[[2-(acetylamino)-2-deoxy-beta-D-galactopyra nosyl]oxy]-14,14-bis[[3-[[3-[[5-[[2-(acetylamino)-2-deoxy-b eta-D-galactopyranosyl]oxy]-1-oxopentyl]amino]propyl]amino] -3-oxopropoxy]methyl]-1,12,19,25-tetraoxo-16-oxa-13,20,24-t riazanonacos-1-yl]-4-hydroxy-2-pyrrolidinyl)methyl ester
gctgagaaggaaagtgctctt

SEQ ID NO: 1810 - RNA, 21 nt, synthetic construct
  source 1..21: mol_type = other RNA
  modified_base 1: mod_base = OTHER; note = 2'-O-methylguanosine-3'-phosphorothioate
  modified_base 2: mod_base = OTHER; note = 2'-O-methyladenosine-3'-phosphorothioate
  modified_base 3: mod_base = OTHER; note = 2'-O-methyladenosine-3'-phosphate
  modified_base 4: mod_base = OTHER; note = 2'-O-methylguanosine-3'-phosphate
  modified_base 5: mod_base = OTHER; note = 2'-O-methylguanosine-3'-phosphate
  modified_base 6: mod_base = OTHER; note = 2'-O-methyladenosine-3'-phosphate
  modified_base 7: mod_base = OTHER; note = 2'-deoxy-2'-fluoroadenosine-3'-phosphate
  modified_base 8: mod_base = OTHER; note = 2'-O-methyladenosine-3'-phosphate
  modified_base 9: mod_base = OTHER; note = 2'-deoxy-2'-fluoroguanosine-3'-phosphate
  modified_base 10: mod_base = OTHER; note = 2'-deoxy-2'-fluorouridine-3'-phosphate
  modified_base 11: mod_base = OTHER; note = 2'-deoxy-2'-fluoroguanosine-3'-phosphate
  modified_base 12: mod_base = OTHER; note = 2'-O-methylcytidine-3'-phosphate
  modified_base 13: mod_base = OTHER; note = 2'-O-methyluridine-3'-phosphate
  modified_base 14: mod_base = OTHER; note = 2'-O-methylcytidine-3'-phosphate
  modified_base 15: mod_base = OTHER; note = 2'-O-methyluridine-3'-phosphate
  modified_base 16: mod_base = OTHER; note = 2'-O-methylguanosine-3'-phosphate
  modified_base 17: mod_base = OTHER; note = 2'-O-methylguanosine-3'-phosphate
  modified_base 18: mod_base = OTHER; note = 2'-O-methyluridine-3'-phosphate
  modified_base 19: mod_base = OTHER; note = 2'-O-methylguanosine-3'-phosphate
  modified_base 20: mod_base = OTHER; note = 2'-O-methylcytidine-3'-phosphate
  modified_base 21: mod_base = OTHER; note = 2'-O-methyluridine-3'-phosphate ((2S,4R)-1-[29-[[2-(acetylamino)-2-deoxy-beta-D-galactopyra nosyl]oxy]-14,14-bis[[3-[[3-[[5-[[2-(acetylamino)-2-deoxy-b eta-D-galactopyranosyl]oxy]-1-oxopentyl]amino]propyl]amino] -3-oxopropoxy]methyl]-1,12,19,25-tetraoxo-16-oxa-13,20,24-t riazanonacos-1-yl]-4-hydroxy-2-pyrrolidinyl)methyl ester
gaaggaaagtgctctggtgct

SEQ ID NO: 1811 - RNA, 21 nt, synthetic construct
  source 1..21: mol_type = other RNA
  modified_base 1: mod_base = OTHER; note = 2'-O-methylcytidine-3'-phosphorothioate
  modified_base 2: mod_base = OTHER; note = 2'-O-methyluridine-3'-phosphorothioate
  modified_base 3: mod_base = OTHER; note = 2'-O-methylguanosine-3'-phosphate
  modified_base 4: mod_base = OTHER; note = 2'-O-methylguanosine-3'-phosphate
  modified_base 5: mod_base = OTHER; note = 2'-O-methyluridine-3'-phosphate
  modified_base 6: mod_base = OTHER; note = 2'-O-methylguanosine-3'-phosphate
  modified_base 7: mod_base = OTHER; note = 2'-deoxy-2'-fluorocytidine-3'-phosphate
  modified_base 8: mod_base = OTHER; note = 2'-O-methylcytidine-3'-phosphate
  modified_base 9: mod_base = OTHER; note = 2'-deoxy-2'-fluorouridine-3'-phosphate
  modified_base 10: mod_base = OTHER; note = 2'-deoxy-2'-fluorocytidine-3'-phosphate
  modified_base 11: mod_base = OTHER; note = 2'-deoxy-2'-fluorocytidine-3'-phosphate
  modified_base 12: mod_base = OTHER; note = 2'-O-methyladenosine-3'-phosphate
  modified_base 13: mod_base = OTHER; note = 2'-O-methyladenosine-3'-phosphate
  modified_base 14: mod_base = OTHER; note = 2'-O-methyluridine-3'-phosphate
  modified_base 15: mod_base = OTHER; note = 2'-O-methyladenosine-3'-phosphate
  modified_base 16: mod_base = OTHER; note = 2'-O-methylcytidine-3'-phosphate
  modified_base 17: mod_base = OTHER; note = 2'-O-methyladenosine-3'-phosphate
  modified_base 18: mod_base = OTHER; note = 2'-O-methyluridine-3'-phosphate
  modified_base 19: mod_base = OTHER; note = 2'-O-methyladenosine-3'-phosphate
  modified_base 20: mod_base = OTHER; note = 2'-O-methylguanosine-3'-phosphate
  modified_base 21: mod_base = OTHER; note = 2'-O-methyluridine-3'-phosphate ((2S,4R)-1-[29-[[2-(acetylamino)-2-deoxy-beta-D-galactopyra nosyl]oxy]-14,14-bis[[3-[[3-[[5-[[2-(acetylamino)-2-deoxy-b eta-D-galactopyranosyl]oxy]-1-oxopentyl]amino]propyl]amino] -3-oxopropoxy]methyl]-1,12,19,25-tetraoxo-16-oxa-13,20,24-t riazanonacos-1-yl]-4-hydroxy-2-pyrrolidinyl)methyl ester
ctggtgcctccaatacatagt

SEQ ID NO: 1812 - RNA, 21 nt, synthetic construct
  source 1..21: mol_type = other RNA
  modified_base 1: mod_base = OTHER; note = 2'-O-methylcytidine-3'-phosphorothioate
  modified_base 2: mod_base = OTHER; note = 2'-O-methylcytidine-3'-phosphorothioate
  modified_base 3: mod_base = OTHER; note = 2'-O-methyluridine-3'-phosphate
  modified_base 4: mod_base = OTHER; note = 2'-O-methylcytidine-3'-phosphate
  modified_base 5: mod_base = OTHER; note = 2'-O-methylcytidine-3'-phosphate
  modified_base 6: mod_base = OTHER; note = 2'-O-methyladenosine-3'-phosphate
  modified_base 7: mod_base = OTHER; note = 2'-deoxy-2'-fluoroadenosine-3'-phosphate
  modified_base 8: mod_base = OTHER; note = 2'-O-methyluridine-3'-phosphate
  modified_base 9: mod_base = OTHER; note = 2'-deoxy-2'-fluoroadenosine-3'-phosphate
  modified_base 10: mod_base = OTHER; note = 2'-deoxy-2'-fluorocytidine-3'-phosphate
  modified_base 11: mod_base = OTHER; note = 2'-deoxy-2'-fluoroadenosine-3'-phosphate
  modified_base 12: mod_base = OTHER; note = 2'-O-methyluridine-3'-phosphate
  modified_base 13: mod_base = OTHER; note = 2'-O-methyladenosine-3'-phosphate
  modified_base 14: mod_base = OTHER; note = 2'-O-methylguanosine-3'-phosphate
  modified_base 15: mod_base = OTHER; note = 2'-O-methylguanosine-3'-phosphate
  modified_base 16: mod_base = OTHER; note = 2'-O-methylcytidine-3'-phosphate
  modified_base 17: mod_base = OTHER; note = 2'-O-methylcytidine-3'-phosphate
  modified_base 18: mod_base = OTHER; note = 2'-O-methyluridine-3'-phosphate
  modified_base 19: mod_base = OTHER; note = 2'-O-methylguanosine-3'-phosphate
  modified_base 20: mod_base = OTHER; note = 2'-O-methylguanosine-3'-phosphate
  modified_base 21: mod_base = OTHER; note = 2'-O-methyluridine-3'-phosphate ((2S,4R)-1-[29-[[2-(acetylamino)-2-deoxy-beta-D-galactopyra nosyl]oxy]-14,14-bis[[3-[[3-[[5-[[2-(acetylamino)-2-deoxy-b eta-D-galactopyranosyl]oxy]-1-oxopentyl]amino]propyl]amino] -3-oxopropoxy]methyl]-1,12,19,25-tetraoxo-16-oxa-13,20,24-t riazanonacos-1-yl]-4-hydroxy-2-pyrrolidinyl)methyl ester
cctccaatacataggcctggt

SEQ ID NO: 1813 - RNA, 21 nt, synthetic construct
  source 1..21: mol_type = other RNA
  modified_base 1: mod_base = OTHER; note = 2'-O-methyladenosine-3'-phosphorothioate
  modified_base 2: mod_base = OTHER; note = 2'-O-methyladenosine-3'-phosphorothioate
  modified_base 3: mod_base = OTHER; note = 2'-O-methyluridine-3'-phosphate
  modified_base 4: mod_base = OTHER; note = 2'-O-methyladenosine-3'-phosphate
  modified_base 5: mod_base = OTHER; note = 2'-O-methylcytidine-3'-phosphate
  modified_base 6: mod_base = OTHER; note = 2'-O-methyladenosine-3'-phosphate
  modified_base 7: mod_base = OTHER; note = 2'-deoxy-2'-fluorouridine-3'-phosphate
  modified_base 8: mod_base = OTHER; note = 2'-O-methyladenosine-3'-phosphate
  modified_base 9: mod_base = OTHER; note = 2'-deoxy-2'-fluoroguanosine-3'-phosphate
  modified_base 10: mod_base = OTHER; note = 2'-deoxy-2'-fluoroguanosine-3'-phosphate
  modified_base 11: mod_base = OTHER; note = 2'-deoxy-2'-fluorocytidine-3'-phosphate
  modified_base 12: mod_base = OTHER; note = 2'-O-methylcytidine-3'-phosphate
  modified_base 13: mod_base = OTHER; note = 2'-O-methyluridine-3'-phosphate
  modified_base 14: mod_base = OTHER; note = 2'-O-methylguanosine-3'-phosphate
  modified_base 15: mod_base = OTHER; note = 2'-O-methylguanosine-3'-phosphate
  modified_base 16: mod_base = OTHER; note = 2'-O-methylguanosine-3'-phosphate
  modified_base 17: mod_base = OTHER; note = 2'-O-methyluridine-3'-phosphate
  modified_base 18: mod_base = OTHER; note = 2'-O-methyluridine-3'-phosphate
  modified_base 19: mod_base = OTHER; note = 2'-O-methyluridine-3'-phosphate
  modified_base 20: mod_base = OTHER; note = 2'-O-methyluridine-3'-phosphate
  modified_base 21: mod_base = OTHER; note = 2'-O-methyluridine-3'-phosphate ((2S,4R)-1-[29-[[2-(acetylamino)-2-deoxy-beta-D-galactopyra nosyl]oxy]-14,14-bis[[3-[[3-[[5-[[2-(acetylamino)-2-deoxy-b eta-D-galactopyranosyl]oxy]-1-oxopentyl]amino]propyl]amino] -3-oxopropoxy]methyl]-1,12,19,25-tetraoxo-16-oxa-13,20,24-t riazanonacos-1-yl]-4-hydroxy-2-pyrrolidinyl)methyl ester
aatacataggcctgggttttt

SEQ ID NO: 1814 - RNA, 21 nt, synthetic construct
  source 1..21: mol_type = other RNA
  modified_base 1: mod_base = OTHER; note = 2'-O-methyluridine-3'-phosphorothioate
  modified_base 2: mod_base = OTHER; note = 2'-O-methyluridine-3'-phosphorothioate
  modified_base 3: mod_base = OTHER; note = 2'-O-methyluridine-3'-phosphate
  modified_base 4: mod_base = OTHER; note = 2'-O-methylcytidine-3'-phosphate
  modified_base 5: mod_base = OTHER; note = 2'-O-methyluridine-3'-phosphate
  modified_base 6: mod_base = OTHER; note = 2'-O-methylguanosine-3'-phosphate
  modified_base 7: mod_base = OTHER; note = 2'-deoxy-2'-fluorocytidine-3'-phosphate
  modified_base 8: mod_base = OTHER; note = 2'-O-methyluridine-3'-phosphate
  modified_base 9: mod_base = OTHER; note = 2'-deoxy-2'-fluoroguanosine-3'-phosphate
  modified_base 10: mod_base = OTHER; note = 2'-deoxy-2'-fluorocytidine-3'-phosphate
  modified_base 11: mod_base = OTHER; note = 2'-deoxy-2'-fluoroadenosine-3'-phosphate
  modified_base 12: mod_base = OTHER; note = 2'-O-methyladenosine-3'-phosphate
  modified_base 13: mod_base = OTHER; note = 2'-O-methyladenosine-3'-phosphate
  modified_base 14: mod_base = OTHER; note = 2'-O-methylcytidine-3'-phosphate
  modified_base 15: mod_base = OTHER; note = 2'-O-methyladenosine-3'-phosphate
  modified_base 16: mod_base = OTHER; note = 2'-O-methyladenosine-3'-phosphate
  modified_base 17: mod_base = OTHER; note = 2'-O-methyladenosine-3'-phosphate
  modified_base 18: mod_base = OTHER; note = 2'-O-methyladenosine-3'-phosphate
  modified_base 19: mod_base = OTHER; note = 2'-O-methylguanosine-3'-phosphate
  modified_base 20: mod_base = OTHER; note = 2'-O-methyladenosine-3'-phosphate
  modified_base 21: mod_base = OTHER; note = 2'-O-methyluridine-3'-phosphate ((2S,4R)-1-[29-[[2-(acetylamino)-2-deoxy-beta-D-galactopyra nosyl]oxy]-14,14-bis[[3-[[3-[[5-[[2-(acetylamino)-2-deoxy-b eta-D-galactopyranosyl]oxy]-1-oxopentyl]amino]propyl]amino] -3-oxopropoxy]methyl]-1,12,19,25-tetraoxo-16-oxa-13,20,24-t riazanonacos-1-yl]-4-hydroxy-2-pyrrolidinyl)methyl ester
tttctgctgcaaacaaaagat

SEQ ID NO: 1815 - RNA, 21 nt, synthetic construct
  source 1..21: mol_type = other RNA
  modified_base 1: mod_base = OTHER; note = 2'-O-methyluridine-3'-phosphorothioate
  modified_base 2: mod_base = OTHER; note = 2'-O-methylguanosine-3'-phosphorothioate
  modified_base 3: mod_base = OTHER; note = 2'-O-methylcytidine-3'-phosphate
  modified_base 4: mod_base = OTHER; note = 2'-O-methyladenosine-3'-phosphate
  modified_base 5: mod_base = OTHER; note = 2'-O-methyladenosine-3'-phosphate
  modified_base 6: mod_base = OTHER; note = 2'-O-methyladenosine-3'-phosphate
  modified_base 7: mod_base = OTHER; note = 2'-deoxy-2'-fluorocytidine-3'-phosphate
  modified_base 8: mod_base = OTHER; note = 2'-O-methyladenosine-3'-phosphate
  modified_base 9: mod_base = OTHER; note = 2'-deoxy-2'-fluoroadenosine-3'-phosphate
  modified_base 10: mod_base = OTHER; note = 2'-deoxy-2'-fluoroadenosine-3'-phosphate
  modified_base 11: mod_base = OTHER; note = 2'-deoxy-2'-fluoroadenosine-3'-phosphate
  modified_base 12: mod_base = OTHER; note = 2'-O-methylguanosine-3'-phosphate
  modified_base 13: mod_base = OTHER; note = 2'-O-methyladenosine-3'-phosphate
  modified_base 14: mod_base = OTHER; note = 2'-O-methylcytidine-3'-phosphate
  modified_base 15: mod_base = OTHER; note = 2'-O-methyluridine-3'-phosphate
  modified_base 16: mod_base = OTHER; note = 2'-O-methylcytidine-3'-phosphate
  modified_base 17: mod_base = OTHER; note = 2'-O-methylguanosine-3'-phosphate
  modified_base 18: mod_base = OTHER; note = 2'-O-methyladenosine-3'-phosphate
  modified_base 19: mod_base = OTHER; note = 2'-O-methylcytidine-3'-phosphate
  modified_base 20: mod_base = OTHER; note = 2'-O-methyluridine-3'-phosphate
  modified_base 21: mod_base = OTHER; note = 2'-O-methyluridine-3'-phosphate ((2S,4R)-1-[29-[[2-(acetylamino)-2-deoxy-beta-D-galactopyra nosyl]oxy]-14,14-bis[[3-[[3-[[5-[[2-(acetylamino)-2-deoxy-b eta-D-galactopyranosyl]oxy]-1-oxopentyl]amino]propyl]amino] -3-oxopropoxy]methyl]-1,12,19,25-tetraoxo-16-oxa-13,20,24-t riazanonacos-1-yl]-4-hydroxy-2-pyrrolidinyl)methyl ester
tgcaaacaaaagactcgactt

SEQ ID NO: 1816 - RNA, 21 nt, synthetic construct
  source 1..21: mol_type = other RNA
  modified_base 1: mod_base = OTHER; note = 2'-O-methyladenosine-3'-phosphorothioate
  modified_base 2: mod_base = OTHER; note = 2'-O-methylcytidine-3'-phosphorothioate
  modified_base 3: mod_base = OTHER; note = 2'-O-methyladenosine-3'-phosphate
  modified_base 4: mod_base = OTHER; note = 2'-O-methyladenosine-3'-phosphate
  modified_base 5: mod_base = OTHER; note = 2'-O-methyladenosine-3'-phosphate
  modified_base 6: mod_base = OTHER; note = 2'-O-methyladenosine-3'-phosphate
  modified_base 7: mod_base = OTHER; note = 2'-deoxy-2'-fluoroguanosine-3'-phosphate
  modified_base 8: mod_base = OTHER; note = 2'-O-methyladenosine-3'-phosphate
  modified_base 9: mod_base = OTHER; note = 2'-deoxy-2'-fluorocytidine-3'-phosphate
  modified_base 10: mod_base = OTHER; note = 2'-deoxy-2'-fluorouridine-3'-phosphate
  modified_base 11: mod_base = OTHER; note = 2'-deoxy-2'-fluorocytidine-3'-phosphate
  modified_base 12: mod_base = OTHER; note = 2'-O-methylguanosine-3'-phosphate
  modified_base 13: mod_base = OTHER; note = 2'-O-methyladenosine-3'-phosphate
  modified_base 14: mod_base = OTHER; note = 2'-O-methylcytidine-3'-phosphate
  modified_base 15: mod_base = OTHER; note = 2'-O-methyluridine-3'-phosphate
  modified_base 16: mod_base = OTHER; note = 2'-O-methyluridine-3'-phosphate
  modified_base 17: mod_base = OTHER; note = 2'-O-methylcytidine-3'-phosphate
  modified_base 18: mod_base = OTHER; note = 2'-O-methylguanosine-3'-phosphate
  modified_base 19: mod_base = OTHER; note = 2'-O-methyladenosine-3'-phosphate
  modified_base 20: mod_base = OTHER; note = 2'-O-methylguanosine-3'-phosphate
  modified_base 21: mod_base = OTHER; note = 2'-O-methyluridine-3'-phosphate ((2S,4R)-1-[29-[[2-(acetylamino)-2-deoxy-beta-D-galactopyra nosyl]oxy]-14,14-bis[[3-[[3-[[5-[[2-(acetylamino)-2-deoxy-b eta-D-galactopyranosyl]oxy]-1-oxopentyl]amino]propyl]amino] -3-oxopropoxy]methyl]-1,12,19,25-tetraoxo-16-oxa-13,20,24-t riazanonacos-1-yl]-4-hydroxy-2-pyrrolidinyl)methyl ester
acaaaagactcgacttcgagt

SEQ ID NO: 1817 - RNA, 21 nt, synthetic construct
  source 1..21: mol_type = other RNA
  modified_base 1: mod_base = OTHER; note = 2'-O-methyladenosine-3'-phosphorothioate
  modified_base 2: mod_base = OTHER; note = 2'-O-methylguanosine-3'-phosphorothioate
  modified_base 3: mod_base = OTHER; note = 2'-O-methyladenosine-3'-phosphate
  modified_base 4: mod_base = OTHER; note = 2'-O-methylcytidine-3'-phosphate
  modified_base 5: mod_base = OTHER; note = 2'-O-methyluridine-3'-phosphate
  modified_base 6: mod_base = OTHER; note = 2'-O-methylcytidine-3'-phosphate
  modified_base 7: mod_base = OTHER; note = 2'-deoxy-2'-fluoroguanosine-3'-phosphate
  modified_base 8: mod_base = OTHER; note = 2'-O-methyladenosine-3'-phosphate
  modified_base 9: mod_base = OTHER; note = 2'-deoxy-2'-fluorocytidine-3'-phosphate
  modified_base 10: mod_base = OTHER; note = 2'-deoxy-2'-fluorouridine-3'-phosphate
  modified_base 11: mod_base = OTHER; note = 2'-deoxy-2'-fluorouridine-3'-phosphate
  modified_base 12: mod_base = OTHER; note = 2'-O-methylcytidine-3'-phosphate
  modified_base 13: mod_base = OTHER; note = 2'-O-methylguanosine-3'-phosphate
  modified_base 14: mod_base = OTHER; note = 2'-O-methyladenosine-3'-phosphate
  modified_base 15: mod_base = OTHER; note = 2'-O-methylguanosine-3'-phosphate
  modified_base 16: mod_base = OTHER; note = 2'-O-methylcytidine-3'-phosphate
  modified_base 17: mod_base = OTHER; note = 2'-O-methylcytidine-3'-phosphate
  modified_base 18: mod_base = OTHER; note = 2'-O-methyladenosine-3'-phosphate
  modified_base 19: mod_base = OTHER; note = 2'-O-methyluridine-3'-phosphate
  modified_base 20: mod_base = OTHER; note = 2'-O-methylguanosine-3'-phosphate
  modified_base 21: mod_base = OTHER; note = 2'-O-methyluridine-3'-phosphate ((2S,4R)-1-[29-[[2-(acetylamino)-2-deoxy-beta-D-galactopyra nosyl]oxy]-14,14-bis[[3-[[3-[[5-[[2-(acetylamino)-2-deoxy-b eta-D-galactopyranosyl]oxy]-1-oxopentyl]amino]propyl]amino] -3-oxopropoxy]methyl]-1,12,19,25-tetraoxo-16-oxa-13,20,24-t riazanonacos-1-yl]-4-hydroxy-2-pyrrolidinyl)methyl ester
agactcgacttcgagccatgt

SEQ ID NO: 1818 - RNA, 21 nt, synthetic construct
  source 1..21: mol_type = other RNA
  modified_base 1: mod_base = OTHER; note = 2'-O-methylguanosine-3'-phosphorothioate
  modified_base 2: mod_base = OTHER; note = 2'-O-methyladenosine-3'-phosphorothioate
  modified_base 3: mod_base = OTHER; note = 2'-O-methylcytidine-3'-phosphate
  modified_base 4: mod_base = OTHER; note = 2'-O-methyluridine-3'-phosphate
  modified_base 5: mod_base = OTHER; note = 2'-O-methyluridine-3'-phosphate
  modified_base 6: mod_base = OTHER; note = 2'-O-methylcytidine-3'-phosphate
  modified_base 7: mod_base = OTHER; note = 2'-deoxy-2'-fluoroguanosine-3'-phosphate
  modified_base 8: mod_base = OTHER; note = 2'-O-methyladenosine-3'-phosphate
  modified_base 9: mod_base = OTHER; note = 2'-deoxy-2'-fluoroguanosine-3'-phosphate
  modified_base 10: mod_base = OTHER; note = 2'-deoxy-2'-fluorocytidine-3'-phosphate
  modified_base 11: mod_base = OTHER; note = 2'-deoxy-2'-fluorocytidine-3'-phosphate
  modified_base 12: mod_base = OTHER; note = 2'-O-methyladenosine-3'-phosphate
  modified_base 13: mod_base = OTHER; note = 2'-O-methyluridine-3'-phosphate
  modified_base 14: mod_base = OTHER; note = 2'-O-methylguanosine-3'-phosphate
  modified_base 15: mod_base = OTHER; note = 2'-O-methylguanosine-3'-phosphate
  modified_base 16: mod_base = OTHER; note = 2'-O-methylguanosine-3'-phosphate
  modified_base 17: mod_base = OTHER; note = 2'-O-methyladenosine-3'-phosphate
  modified_base 18: mod_base = OTHER; note = 2'-O-methyladenosine-3'-phosphate
  modified_base 19: mod_base = OTHER; note = 2'-O-methyladenosine-3'-phosphate
  modified_base 20: mod_base = OTHER; note = 2'-O-methyladenosine-3'-phosphate
  modified_base 21: mod_base = OTHER; note = 2'-O-methyluridine-3'-phosphate ((2S,4R)-1-[29-[[2-(acetylamino)-2-deoxy-beta-D-galactopyra nosyl]oxy]-14,14-bis[[3-[[3-[[5-[[2-(acetylamino)-2-deoxy-b eta-D-galactopyranosyl]oxy]-1-oxopentyl]amino]propyl]amino] -3-oxopropoxy]methyl]-1,12,19,25-tetraoxo-16-oxa-13,20,24-t riazanonacos-1-yl]-4-hydroxy-2-pyrrolidinyl)methyl ester
gacttcgagccatgggaaaat

SEQ ID NO: 1819 - RNA, 21 nt, synthetic construct
  source 1..21: mol_type = other RNA
  modified_base 1: mod_base = OTHER; note = 2'-O-methylcytidine-3'-phosphorothioate
  modified_base 2: mod_base = OTHER; note = 2'-O-methylguanosine-3'-phosphorothioate
  modified_base 3: mod_base = OTHER; note = 2'-O-methyladenosine-3'-phosphate
  modified_base 4: mod_base = OTHER; note = 2'-O-methylguanosine-3'-phosphate
  modified_base 5: mod_base = OTHER; note = 2'-O-methylcytidine-3'-phosphate
  modified_base 6: mod_base = OTHER; note = 2'-O-methylcytidine-3'-phosphate
  modified_base 7: mod_base = OTHER; note = 2'-deoxy-2'-fluoroadenosine-3'-phosphate
  modified_base 8: mod_base = OTHER; note = 2'-O-methyluridine-3'-phosphate
  modified_base 9: mod_base = OTHER; note = 2'-deoxy-2'-fluoroguanosine-3'-phosphate
  modified_base 10: mod_base = OTHER; note = 2'-deoxy-2'-fluoroguanosine-3'-phosphate
  modified_base 11: mod_base = OTHER; note = 2'-deoxy-2'-fluoroguanosine-3'-phosphate
  modified_base 12: mod_base = OTHER; note = 2'-O-methyladenosine-3'-phosphate
  modified_base 13: mod_base = OTHER; note = 2'-O-methyladenosine-3'-phosphate
  modified_base 14: mod_base = OTHER; note = 2'-O-methyladenosine-3'-phosphate
  modified_base 15: mod_base = OTHER; note = 2'-O-methyladenosine-3'-phosphate
  modified_base 16: mod_base = OTHER; note = 2'-O-methylguanosine-3'-phosphate
  modified_base 17: mod_base = OTHER; note = 2'-O-methylguanosine-3'-phosphate
  modified_base 18: mod_base = OTHER; note = 2'-O-methylguanosine-3'-phosphate
  modified_base 19: mod_base = OTHER; note = 2'-O-methyladenosine-3'-phosphate
  modified_base 20: mod_base = OTHER; note = 2'-O-methyladenosine-3'-phosphate
  modified_base 21: mod_base = OTHER; note = 2'-O-methyluridine-3'-phosphate ((2S,4R)-1-[29-[[2-(acetylamino)-2-deoxy-beta-D-galactopyra nosyl]oxy]-14,14-bis[[3-[[3-[[5-[[2-(acetylamino)-2-deoxy-b eta-D-galactopyranosyl]oxy]-1-oxopentyl]amino]propyl]amino] -3-oxopropoxy]methyl]-1,12,19,25-tetraoxo-16-oxa-13,20,24-t riazanonacos-1-yl]-4-hydroxy-2-pyrrolidinyl)methyl ester
cgagccatgggaaaagggaat

SEQ ID NO: 1820 - RNA, 21 nt, synthetic construct
  source 1..21: mol_type = other RNA
  modified_base 1: mod_base = OTHER; note = 2'-O-methylcytidine-3'-phosphorothioate
  modified_base 2: mod_base = OTHER; note = 2'-O-methyladenosine-3'-phosphorothioate
  modified_base 3: mod_base = OTHER; note = 2'-O-methyluridine-3'-phosphate
  modified_base 4: mod_base = OTHER; note = 2'-O-methylguanosine-3'-phosphate
  modified_base 5: mod_base = OTHER; note = 2'-O-methylguanosine-3'-phosphate
  modified_base 6: mod_base = OTHER; note = 2'-O-methylguanosine-3'-phosphate
  modified_base 7: mod_base = OTHER; note = 2'-deoxy-2'-fluoroadenosine-3'-phosphate
  modified_base 8: mod_base = OTHER; note = 2'-O-methyladenosine-3'-phosphate
  modified_base 9: mod_base = OTHER; note = 2'-deoxy-2'-fluoroadenosine-3'-phosphate
  modified_base 10: mod_base = OTHER; note = 2'-deoxy-2'-fluoroadenosine-3'-phosphate
  modified_base 11: mod_base = OTHER; note = 2'-deoxy-2'-fluoroguanosine-3'-phosphate
  modified_base 12: mod_base = OTHER; note = 2'-O-methylguanosine-3'-phosphate
  modified_base 13: mod_base = OTHER; note = 2'-O-methylguanosine-3'-phosphate
  modified_base 14: mod_base = OTHER; note = 2'-O-methyladenosine-3'-phosphate
  modified_base 15: mod_base = OTHER; note = 2'-O-methyladenosine-3'-phosphate
  modified_base 16: mod_base = OTHER; note = 2'-O-methylcytidine-3'-phosphate
  modified_base 17: mod_base = OTHER; note = 2'-O-methylcytidine-3'-phosphate
  modified_base 18: mod_base = OTHER; note = 2'-O-methyluridine-3'-phosphate
  modified_base 19: mod_base = OTHER; note = 2'-O-methylcytidine-3'-phosphate
  modified_base 20: mod_base = OTHER; note = 2'-O-methylguanosine-3'-phosphate
  modified_base 21: mod_base = OTHER; note = 2'-O-methyluridine-3'-phosphate ((2S,4R)-1-[29-[[2-(acetylamino)-2-deoxy-beta-D-galactopyra nosyl]oxy]-14,14-bis[[3-[[3-[[5-[[2-(acetylamino)-2-deoxy-b eta-D-galactopyranosyl]oxy]-1-oxopentyl]amino]propyl]amino] -3-oxopropoxy]methyl]-1,12,19,25-tetraoxo-16-oxa-13,20,24-t riazanonacos-1-yl]-4-hydroxy-2-pyrrolidinyl)methyl ester
catgggaaaagggaacctcgt

SEQ ID NO: 1821 - RNA, 21 nt, synthetic construct
  source 1..21: mol_type = other RNA
  modified_base 1: mod_base = OTHER; note = 2'-O-methyladenosine-3'-phosphorothioate
  modified_base 2: mod_base = OTHER; note = 2'-O-methyladenosine-3'-phosphorothioate
  modified_base 3: mod_base = OTHER; note = 2'-O-methyladenosine-3'-phosphate
  modified_base 4: mod_base = OTHER; note = 2'-O-methylguanosine-3'-phosphate
  modified_base 5: mod_base = OTHER; note = 2'-O-methylguanosine-3'-phosphate
  modified_base 6: mod_base = OTHER; note = 2'-O-methylguanosine-3'-phosphate
  modified_base 7: mod_base = OTHER; note = 2'-deoxy-2'-fluoroadenosine-3'-phosphate
  modified_base 8: mod_base = OTHER; note = 2'-O-methyladenosine-3'-phosphate
  modified_base 9: mod_base = OTHER; note = 2'-deoxy-2'-fluorocytidine-3'-phosphate
  modified_base 10: mod_base = OTHER; note = 2'-deoxy-2'-fluorocytidine-3'-phosphate
  modified_base 11: mod_base = OTHER; note = 2'-deoxy-2'-fluorouridine-3'-phosphate
  modified_base 12: mod_base = OTHER; note = 2'-O-methylcytidine-3'-phosphate
  modified_base 13: mod_base = OTHER; note = 2'-O-methylguanosine-3'-phosphate
  modified_base 14: mod_base = OTHER; note = 2'-O-methyladenosine-3'-phosphate
  modified_base 15: mod_base = OTHER; note = 2'-O-methyladenosine-3'-phosphate
  modified_base 16: mod_base = OTHER; note = 2'-O-methylguanosine-3'-phosphate
  modified_base 17: mod_base = OTHER; note = 2'-O-methyluridine-3'-phosphate
  modified_base 18: mod_base = OTHER; note = 2'-O-methylcytidine-3'-phosphate
  modified_base 19: mod_base = OTHER; note = 2'-O-methyladenosine-3'-phosphate
  modified_base 20: mod_base = OTHER; note = 2'-O-methyladenosine-3'-phosphate
  modified_base 21: mod_base = OTHER; note = 2'-O-methyluridine-3'-phosphate ((2S,4R)-1-[29-[[2-(acetylamino)-2-deoxy-beta-D-galactopyra nosyl]oxy]-14,14-bis[[3-[[3-[[5-[[2-(acetylamino)-2-deoxy-b eta-D-galactopyranosyl]oxy]-1-oxopentyl]amino]propyl]amino] -3-oxopropoxy]methyl]-1,12,19,25-tetraoxo-16-oxa-13,20,24-t riazanonacos-1-yl]-4-hydroxy-2-pyrrolidinyl)methyl ester
aaagggaacctcgaagtcaat

SEQ ID NO: 1822 - RNA, 21 nt, synthetic construct
  source 1..21: mol_type = other RNA
  modified_base 1: mod_base = OTHER; note = 2'-O-methyladenosine-3'-phosphorothioate
  modified_base 2: mod_base = OTHER; note = 2'-O-methyladenosine-3'-phosphorothioate
  modified_base 3: mod_base = OTHER; note = 2'-O-methylcytidine-3'-phosphate
  modified_base 4: mod_base = OTHER; note = 2'-O-methylcytidine-3'-phosphate
  modified_base 5: mod_base = OTHER; note = 2'-O-methyluridine-3'-phosphate
  modified_base 6: mod_base = OTHER; note = 2'-O-methylcytidine-3'-phosphate
  modified_base 7: mod_base = OTHER; note = 2'-deoxy-2'-fluoroguanosine-3'-phosphate
  modified_base 8: mod_base = OTHER; note = 2'-O-methyladenosine-3'-phosphate
  modified_base 9: mod_base = OTHER; note = 2'-deoxy-2'-fluoroadenosine-3'-phosphate
  modified_base 10: mod_base = OTHER; note = 2'-deoxy-2'-fluoroguanosine-3'-phosphate
  modified_base 11: mod_base = OTHER; note = 2'-deoxy-2'-fluorouridine-3'-phosphate
  modified_base 12: mod_base = OTHER; note = 2'-O-methylcytidine-3'-phosphate
  modified_base 13: mod_base = OTHER; note = 2'-O-methyladenosine-3'-phosphate
  modified_base 14: mod_base = OTHER; note = 2'-O-methyladenosine-3'-phosphate
  modified_base 15: mod_base = OTHER; note = 2'-O-methylcytidine-3'-phosphate
  modified_base 16: mod_base = OTHER; note = 2'-O-methyladenosine-3'-phosphate
  modified_base 17: mod_base = OTHER; note = 2'-O-methylguanosine-3'-phosphate
  modified_base 18: mod_base = OTHER; note = 2'-O-methyladenosine-3'-phosphate
  modified_base 19: mod_base = OTHER; note = 2'-O-methyladenosine-3'-phosphate
  modified_base 20: mod_base = OTHER; note = 2'-O-methyladenosine-3'-phosphate
  modified_base 21: mod_base = OTHER; note = 2'-O-methyluridine-3'-phosphate ((2S,4R)-1-[29-[[2-(acetylamino)-2-deoxy-beta-D-galactopyra nosyl]oxy]-14,14-bis[[3-[[3-[[5-[[2-(acetylamino)-2-deoxy-b eta-D-galactopyranosyl]oxy]-1-oxopentyl]amino]propyl]amino] -3-oxopropoxy]methyl]-1,12,19,25-tetraoxo-16-oxa-13,20,24-t riazanonacos-1-yl]-4-hydroxy-2-pyrrolidinyl)methyl ester
aacctcgaagtcaacagaaat

SEQ ID NO: 1823 - RNA, 21 nt, synthetic construct
  source 1..21: mol_type = other RNA
  modified_base 1: mod_base = OTHER; note = 2'-O-methylguanosine-3'-phosphorothioate
  modified_base 2: mod_base = OTHER; note = 2'-O-methyladenosine-3'-phosphorothioate
  modified_base 3: mod_base = OTHER; note = 2'-O-methyladenosine-3'-phosphate
  modified_base 4: mod_base = OTHER; note = 2'-O-methylguanosine-3'-phosphate
  modified_base 5: mod_base = OTHER; note = 2'-O-methyluridine-3'-phosphate
  modified_base 6: mod_base = OTHER; note = 2'-O-methylcytidine-3'-phosphate
  modified_base 7: mod_base = OTHER; note = 2'-deoxy-2'-fluoroadenosine-3'-phosphate
  modified_base 8: mod_base = OTHER; note = 2'-O-methyladenosine-3'-phosphate
  modified_base 9: mod_base = OTHER; note = 2'-deoxy-2'-fluorocytidine-3'-phosphate
  modified_base 10: mod_base = OTHER; note = 2'-deoxy-2'-fluoroadenosine-3'-phosphate
  modified_base 11: mod_base = OTHER; note = 2'-deoxy-2'-fluoroguanosine-3'-phosphate
  modified_base 12: mod_base = OTHER; note = 2'-O-methyladenosine-3'-phosphate
  modified_base 13: mod_base = OTHER; note = 2'-O-methyladenosine-3'-phosphate
  modified_base 14: mod_base = OTHER; note = 2'-O-methyladenosine-3'-phosphate
  modified_base 15: mod_base = OTHER; note = 2'-O-methylcytidine-3'-phosphate
  modified_base 16: mod_base = OTHER; note = 2'-O-methyladenosine-3'-phosphate
  modified_base 17: mod_base = OTHER; note = 2'-O-methyladenosine-3'-phosphate
  modified_base 18: mod_base = OTHER; note = 2'-O-methyladenosine-3'-phosphate
  modified_base 19: mod_base = OTHER; note = 2'-O-methyluridine-3'-phosphate
  modified_base 20: mod_base = OTHER; note = 2'-O-methylcytidine-3'-phosphate
  modified_base 21: mod_base = OTHER; note = 2'-O-methyluridine-3'-phosphate ((2S,4R)-1-[29-[[2-(acetylamino)-2-deoxy-beta-D-galactopyra nosyl]oxy]-14,14-bis[[3-[[3-[[5-[[2-(acetylamino)-2-deoxy-b eta-D-galactopyranosyl]oxy]-1-oxopentyl]amino]propyl]amino] -3-oxopropoxy]methyl]-1,12,19,25-tetraoxo-16-oxa-13,20,24-t riazanonacos-1-yl]-4-hydroxy-2-pyrrolidinyl)methyl ester
gaagtcaacagaaacaaatct

SEQ ID NO: 1824 - RNA, 21 nt, synthetic construct
  source 1..21: mol_type = other RNA
  modified_base 1: mod_base = OTHER; note = 2'-O-methylcytidine-3'-phosphorothioate
  modified_base 2: mod_base = OTHER; note = 2'-O-methyladenosine-3'-phosphorothioate
  modified_base 3: mod_base = OTHER; note = 2'-O-methyladenosine-3'-phosphate
  modified_base 4: mod_base = OTHER; note = 2'-O-methylcytidine-3'-phosphate
  modified_base 5: mod_base = OTHER; note = 2'-O-methyladenosine-3'-phosphate
  modified_base 6: mod_base = OTHER; note = 2'-O-methylguanosine-3'-phosphate
  modified_base 7: mod_base = OTHER; note = 2'-deoxy-2'-fluoroadenosine-3'-phosphate
  modified_base 8: mod_base = OTHER; note = 2'-O-methyladenosine-3'-phosphate
  modified_base 9: mod_base = OTHER; note = 2'-deoxy-2'-fluoroadenosine-3'-phosphate
  modified_base 10: mod_base = OTHER; note = 2'-deoxy-2'-fluorocytidine-3'-phosphate
  modified_base 11: mod_base = OTHER; note = 2'-deoxy-2'-fluoroadenosine-3'-phosphate
  modified_base 12: mod_base = OTHER; note = 2'-O-methyladenosine-3'-phosphate
  modified_base 13: mod_base = OTHER; note = 2'-O-methyladenosine-3'-phosphate
  modified_base 14: mod_base = OTHER; note = 2'-O-methyluridine-3'-phosphate
  modified_base 15: mod_base = OTHER; note = 2'-O-methylcytidine-3'-phosphate
  modified_base 16: mod_base = OTHER; note = 2'-O-methylcytidine-3'-phosphate
  modified_base 17: mod_base = OTHER; note = 2'-O-methyluridine-3'-phosphate
  modified_base 18: mod_base = OTHER; note = 2'-O-methylcytidine-3'-phosphate
  modified_base 19: mod_base = OTHER; note = 2'-O-methylcytidine-3'-phosphate
  modified_base 20: mod_base = OTHER; note = 2'-O-methylcytidine-3'-phosphate
  modified_base 21: mod_base = OTHER; note = 2'-O-methyluridine-3'-phosphate ((2S,4R)-1-[29-[[2-(acetylamino)-2-deoxy-beta-D-galactopyra nosyl]oxy]-14,14-bis[[3-[[3-[[5-[[2-(acetylamino)-2-deoxy-b eta-D-galactopyranosyl]oxy]-1-oxopentyl]amino]propyl]amino] -3-oxopropoxy]methyl]-1,12,19,25-tetraoxo-16-oxa-13,20,24-t riazanonacos-1-yl]-4-hydroxy-2-pyrrolidinyl)methyl ester
caacagaaacaaatcctccct

SEQ ID NO: 1825 - RNA, 21 nt, synthetic construct
  source 1..21: mol_type = other RNA
  modified_base 1: mod_base = OTHER; note = 2'-O-methyladenosine-3'-phosphorothioate
  modified_base 2: mod_base = OTHER; note = 2'-O-methyladenosine-3'-phosphorothioate
  modified_base 3: mod_base = OTHER; note = 2'-O-methyladenosine-3'-phosphate
  modified_base 4: mod_base = OTHER; note = 2'-O-methylcytidine-3'-phosphate
  modified_base 5: mod_base = OTHER; note = 2'-O-methyladenosine-3'-phosphate
  modified_base 6: mod_base = OTHER; note = 2'-O-methyladenosine-3'-phosphate
  modified_base 7: mod_base = OTHER; note = 2'-deoxy-2'-fluoroadenosine-3'-phosphate
  modified_base 8: mod_base = OTHER; note = 2'-O-methyluridine-3'-phosphate
  modified_base 9: mod_base = OTHER; note = 2'-deoxy-2'-fluorocytidine-3'-phosphate
  modified_base 10: mod_base = OTHER; note = 2'-deoxy-2'-fluorocytidine-3'-phosphate
  modified_base 11: mod_base = OTHER; note = 2'-deoxy-2'-fluorouridine-3'-phosphate
  modified_base 12: mod_base = OTHER; note = 2'-O-methylcytidine-3'-phosphate
  modified_base 13: mod_base = OTHER; note = 2'-O-methylcytidine-3'-phosphate
  modified_base 14: mod_base = OTHER; note = 2'-O-methylcytidine-3'-phosphate
  modified_base 15: mod_base = OTHER; note = 2'-O-methyladenosine-3'-phosphate
  modified_base 16: mod_base = OTHER; note = 2'-O-methyluridine-3'-phosphate
  modified_base 17: mod_base = OTHER; note = 2'-O-methylcytidine-3'-phosphate
  modified_base 18: mod_base = OTHER; note = 2'-O-methyladenosine-3'-phosphate
  modified_base 19: mod_base = OTHER; note = 2'-O-methyluridine-3'-phosphate
  modified_base 20: mod_base = OTHER; note = 2'-O-methylguanosine-3'-phosphate
  modified_base 21: mod_base = OTHER; note = 2'-O-methyluridine-3'-phosphate ((2S,4R)-1-[29-[[2-(acetylamino)-2-deoxy-beta-D-galactopyra nosyl]oxy]-14,14-bis[[3-[[3-[[5-[[2-(acetylamino)-2-deoxy-b eta-D-galactopyranosyl]oxy]-1-oxopentyl]amino]propyl]amino] -3-oxopropoxy]methyl]-1,12,19,25-tetraoxo-16-oxa-13,20,24-t riazanonacos-1-yl]-4-hydroxy-2-pyrrolidinyl)methyl ester
aaacaaatcctcccatcatgt

SEQ ID NO: 1826 - RNA, 21 nt, synthetic construct
  source 1..21: mol_type = other RNA
  modified_base 1: mod_base = OTHER; note = 2'-O-methyladenosine-3'-phosphorothioate
  modified_base 2: mod_base = OTHER; note = 2'-O-methyluridine-3'-phosphorothioate
  modified_base 3: mod_base = OTHER; note = 2'-O-methylcytidine-3'-phosphate
  modified_base 4: mod_base = OTHER; note = 2'-O-methylcytidine-3'-phosphate
  modified_base 5: mod_base = OTHER; note = 2'-O-methyluridine-3'-phosphate
  modified_base 6: mod_base = OTHER; note = 2'-O-methylcytidine-3'-phosphate
  modified_base 7: mod_base = OTHER; note = 2'-deoxy-2'-fluorocytidine-3'-phosphate
  modified_base 8: mod_base = OTHER; note = 2'-O-methylcytidine-3'-phosphate
  modified_base 9: mod_base = OTHER; note = 2'-deoxy-2'-fluoroadenosine-3'-phosphate
  modified_base 10: mod_base = OTHER; note = 2'-deoxy-2'-fluorouridine-3'-phosphate
  modified_base 11: mod_base = OTHER; note = 2'-deoxy-2'-fluorocytidine-3'-phosphate
  modified_base 12: mod_base = OTHER; note = 2'-O-methyladenosine-3'-phosphate
  modified_base 13: mod_base = OTHER; note = 2'-O-methyluridine-3'-phosphate
  modified_base 14: mod_base = OTHER; note = 2'-O-methylguanosine-3'-phosphate
  modified_base 15: mod_base = OTHER; note = 2'-O-methyladenosine-3'-phosphate
  modified_base 16: mod_base = OTHER; note = 2'-O-methyladenosine-3'-phosphate
  modified_base 17: mod_base = OTHER; note = 2'-O-methyladenosine-3'-phosphate
  modified_base 18: mod_base = OTHER; note = 2'-O-methylcytidine-3'-phosphate
  modified_base 19: mod_base = OTHER; note = 2'-O-methyladenosine-3'-phosphate
  modified_base 20: mod_base = OTHER; note = 2'-O-methyladenosine-3'-phosphate
  modified_base 21: mod_base = OTHER; note = 2'-O-methyluridine-3'-phosphate ((2S,4R)-1-[29-[[2-(acetylamino)-2-deoxy-beta-D-galactopyra nosyl]oxy]-14,14-bis[[3-[[3-[[5-[[2-(acetylamino)-2-deoxy-b eta-D-galactopyranosyl]oxy]-1-oxopentyl]amino]propyl]amino] -3-oxopropoxy]methyl]-1,12,19,25-tetraoxo-16-oxa-13,20,24-t riazanonacos-1-yl]-4-hydroxy-2-pyrrolidinyl)methyl ester
atcctcccatcatgaaacaat

SEQ ID NO: 1827 - RNA, 21 nt, synthetic construct
  source 1..21: mol_type = other RNA
  modified_base 1: mod_base = OTHER; note = 2'-O-methylcytidine-3'-phosphorothioate
  modified_base 2: mod_base = OTHER; note = 2'-O-methylcytidine-3'-phosphorothioate
  modified_base 3: mod_base = OTHER; note = 2'-O-methylcytidine-3'-phosphate
  modified_base 4: mod_base = OTHER; note = 2'-O-methyladenosine-3'-phosphate
  modified_base 5: mod_base = OTHER; note = 2'-O-methyluridine-3'-phosphate
  modified_base 6: mod_base = OTHER; note = 2'-O-methylcytidine-3'-phosphate
  modified_base 7: mod_base = OTHER; note = 2'-deoxy-2'-fluoroadenosine-3'-phosphate
  modified_base 8: mod_base = OTHER; note = 2'-O-methyluridine-3'-phosphate
  modified_base 9: mod_base = OTHER; note = 2'-deoxy-2'-fluoroguanosine-3'-phosphate
  modified_base 10: mod_base = OTHER; note = 2'-deoxy-2'-fluoroadenosine-3'-phosphate
  modified_base 11: mod_base = OTHER; note = 2'-deoxy-2'-fluoroadenosine-3'-phosphate
  modified_base 12: mod_base = OTHER; note = 2'-O-methyladenosine-3'-phosphate
  modified_base 13: mod_base = OTHER; note = 2'-O-methylcytidine-3'-phosphate
  modified_base 14: mod_base = OTHER; note = 2'-O-methyladenosine-3'-phosphate
  modified_base 15: mod_base = OTHER; note = 2'-O-methyladenosine-3'-phosphate
  modified_base 16: mod_base = OTHER; note = 2'-O-methyladenosine-3'-phosphate
  modified_base 17: mod_base = OTHER; note = 2'-O-methylcytidine-3'-phosphate
  modified_base 18: mod_base = OTHER; note = 2'-O-methyluridine-3'-phosphate
  modified_base 19: mod_base = OTHER; note = 2'-O-methylcytidine-3'-phosphate
  modified_base 20: mod_base = OTHER; note = 2'-O-methyluridine-3'-phosphate
  modified_base 21: mod_base = OTHER; note = 2'-O-methyluridine-3'-phosphate ((2S,4R)-1-[29-[[2-(acetylamino)-2-deoxy-beta-D-galactopyra nosyl]oxy]-14,14-bis[[3-[[3-[[5-[[2-(acetylamino)-2-deoxy-b eta-D-galactopyranosyl]oxy]-1-oxopentyl]amino]propyl]amino] -3-oxopropoxy]methyl]-1,12,19,25-tetraoxo-16-oxa-13,20,24-t riazanonacos-1-yl]-4-hydroxy-2-pyrrolidinyl)methyl ester
cccatcatgaaacaaactctt

SEQ ID NO: 1828 - RNA, 21 nt, synthetic construct
  source 1..21: mol_type = other RNA
  modified_base 1: mod_base = OTHER; note = 2'-O-methyladenosine-3'-phosphorothioate
  modified_base 2: mod_base = OTHER; note = 2'-O-methyluridine-3'-phosphorothioate
  modified_base 3: mod_base = OTHER; note = 2'-O-methylguanosine-3'-phosphate
  modified_base 4: mod_base = OTHER; note = 2'-O-methyladenosine-3'-phosphate
  modified_base 5: mod_base = OTHER; note = 2'-O-methyladenosine-3'-phosphate
  modified_base 6: mod_base = OTHER; note = 2'-O-methyladenosine-3'-phosphate
  modified_base 7: mod_base = OTHER; note = 2'-deoxy-2'-fluorocytidine-3'-phosphate
  modified_base 8: mod_base = OTHER; note = 2'-O-methyladenosine-3'-phosphate
  modified_base 9: mod_base = OTHER; note = 2'-deoxy-2'-fluoroadenosine-3'-phosphate
  modified_base 10: mod_base = OTHER; note = 2'-deoxy-2'-fluoroadenosine-3'-phosphate
  modified_base 11: mod_base = OTHER; note = 2'-deoxy-2'-fluorocytidine-3'-phosphate
  modified_base 12: mod_base = OTHER; note = 2'-O-methyluridine-3'-phosphate
  modified_base 13: mod_base = OTHER; note = 2'-O-methylcytidine-3'-phosphate
  modified_base 14: mod_base = OTHER; note = 2'-O-methyluridine-3'-phosphate
  modified_base 15: mod_base = OTHER; note = 2'-O-methylguanosine-3'-phosphate
  modified_base 16: mod_base = OTHER; note = 2'-O-methylcytidine-3'-phosphate
  modified_base 17: mod_base = OTHER; note = 2'-O-methylcytidine-3'-phosphate
  modified_base 18: mod_base = OTHER; note = 2'-O-methyluridine-3'-phosphate
  modified_base 19: mod_base = OTHER; note = 2'-O-methyladenosine-3'-phosphate
  modified_base 20: mod_base = OTHER; note = 2'-O-methylcytidine-3'-phosphate
  modified_base 21: mod_base = OTHER; note = 2'-O-methyluridine-3'-phosphate ((2S,4R)-1-[29-[[2-(acetylamino)-2-deoxy-beta-D-galactopyra nosyl]oxy]-14,14-bis[[3-[[3-[[5-[[2-(acetylamino)-2-deoxy-b eta-D-galactopyranosyl]oxy]-1-oxopentyl]amino]propyl]amino] -3-oxopropoxy]methyl]-1,12,19,25-tetraoxo-16-oxa-13,20,24-t riazanonacos-1-yl]-4-hydroxy-2-pyrrolidinyl)methyl ester
atgaaacaaactctgcctact

SEQ ID NO: 1829 - RNA, 21 nt, synthetic construct
  source 1..21: mol_type = other RNA
  modified_base 1: mod_base = OTHER; note = 2'-O-methyladenosine-3'-phosphorothioate
  modified_base 2: mod_base = OTHER; note = 2'-O-methylcytidine-3'-phosphorothioate
  modified_base 3: mod_base = OTHER; note = 2'-O-methyluridine-3'-phosphate
  modified_base 4: mod_base = OTHER; note = 2'-O-methylcytidine-3'-phosphate
  modified_base 5: mod_base = OTHER; note = 2'-O-methyluridine-3'-phosphate
  modified_base 6: mod_base = OTHER; note = 2'-O-methylguanosine-3'-phosphate
  modified_base 7: mod_base = OTHER; note = 2'-deoxy-2'-fluorocytidine-3'-phosphate
  modified_base 8: mod_base = OTHER; note = 2'-O-methylcytidine-3'-phosphate
  modified_base 9: mod_base = OTHER; note = 2'-deoxy-2'-fluorouridine-3'-phosphate
  modified_base 10: mod_base = OTHER; note = 2'-deoxy-2'-fluoroadenosine-3'-phosphate
  modified_base 11: mod_base = OTHER; note = 2'-deoxy-2'-fluorocytidine-3'-phosphate
  modified_base 12: mod_base = OTHER; note = 2'-O-methyladenosine-3'-phosphate
  modified_base 13: mod_base = OTHER; note = 2'-O-methyluridine-3'-phosphate
  modified_base 14: mod_base = OTHER; note = 2'-O-methylguanosine-3'-phosphate
  modified_base 15: mod_base = OTHER; note = 2'-O-methyluridine-3'-phosphate
  modified_base 16: mod_base = OTHER; note = 2'-O-methyluridine-3'-phosphate
  modified_base 17: mod_base = OTHER; note = 2'-O-methyladenosine-3'-phosphate
  modified_base 18: mod_base = OTHER; note = 2'-O-methyluridine-3'-phosphate
  modified_base 19: mod_base = OTHER; note = 2'-O-methylcytidine-3'-phosphate
  modified_base 20: mod_base = OTHER; note = 2'-O-methyluridine-3'-phosphate
  modified_base 21: mod_base = OTHER; note = 2'-O-methyluridine-3'-phosphate ((2S,4R)-1-[29-[[2-(acetylamino)-2-deoxy-beta-D-galactopyra nosyl]oxy]-14,14-bis[[3-[[3-[[5-[[2-(acetylamino)-2-deoxy-b eta-D-galactopyranosyl]oxy]-1-oxopentyl]amino]propyl]amino] -3-oxopropoxy]methyl]-1,12,19,25-tetraoxo-16-oxa-13,20,24-t riazanonacos-1-yl]-4-hydroxy-2-pyrrolidinyl)methyl ester
actctgcctacatgttatctt

SEQ ID NO: 1830 - RNA, 21 nt, synthetic construct
  source 1..21: mol_type = other RNA
  modified_base 1: mod_base = OTHER; note = 2'-O-methylguanosine-3'-phosphorothioate
  modified_base 2: mod_base = OTHER; note = 2'-O-methylcytidine-3'-phosphorothioate
  modified_base 3: mod_base = OTHER; note = 2'-O-methylcytidine-3'-phosphate
  modified_base 4: mod_base = OTHER; note = 2'-O-methyluridine-3'-phosphate
  modified_base 5: mod_base = OTHER; note = 2'-O-methyladenosine-3'-phosphate
  modified_base 6: mod_base = OTHER; note = 2'-O-methylcytidine-3'-phosphate
  modified_base 7: mod_base = OTHER; note = 2'-deoxy-2'-fluoroadenosine-3'-phosphate
  modified_base 8: mod_base = OTHER; note = 2'-O-methyluridine-3'-phosphate
  modified_base 9: mod_base = OTHER; note = 2'-deoxy-2'-fluoroguanosine-3'-phosphate
  modified_base 10: mod_base = OTHER; note = 2'-deoxy-2'-fluorouridine-3'-phosphate
  modified_base 11: mod_base = OTHER; note = 2'-deoxy-2'-fluorouridine-3'-phosphate
  modified_base 12: mod_base = OTHER; note = 2'-O-methyladenosine-3'-phosphate
  modified_base 13: mod_base = OTHER; note = 2'-O-methyluridine-3'-phosphate
  modified_base 14: mod_base = OTHER; note = 2'-O-methylcytidine-3'-phosphate
  modified_base 15: mod_base = OTHER; note = 2'-O-methyluridine-3'-phosphate
  modified_base 16: mod_base = OTHER; note = 2'-O-methylcytidine-3'-phosphate
  modified_base 17: mod_base = OTHER; note = 2'-O-methylcytidine-3'-phosphate
  modified_base 18: mod_base = OTHER; note = 2'-O-methyladenosine-3'-phosphate
  modified_base 19: mod_base = OTHER; note = 2'-O-methyladenosine-3'-phosphate
  modified_base 20: mod_base = OTHER; note = 2'-O-methyladenosine-3'-phosphate
  modified_base 21: mod_base = OTHER; note = 2'-O-methyluridine-3'-phosphate ((2S,4R)-1-[29-[[2-(acetylamino)-2-deoxy-beta-D-galactopyra nosyl]oxy]-14,14-bis[[3-[[3-[[5-[[2-(acetylamino)-2-deoxy-b eta-D-galactopyranosyl]oxy]-1-oxopentyl]amino]propyl]amino] -3-oxopropoxy]methyl]-1,12,19,25-tetraoxo-16-oxa-13,20,24-t riazanonacos-1-yl]-4-hydroxy-2-pyrrolidinyl)methyl ester
gcctacatgttatctccaaat

SEQ ID NO: 1831 - RNA, 21 nt, synthetic construct
  source 1..21: mol_type = other RNA
  modified_base 1: mod_base = OTHER; note = 2'-O-methylcytidine-3'-phosphorothioate
  modified_base 2: mod_base = OTHER; note = 2'-O-methyladenosine-3'-phosphorothioate
  modified_base 3: mod_base = OTHER; note = 2'-O-methyluridine-3'-phosphate
  modified_base 4: mod_base = OTHER; note = 2'-O-methylguanosine-3'-phosphate
  modified_base 5: mod_base = OTHER; note = 2'-O-methyluridine-3'-phosphate
  modified_base 6: mod_base = OTHER; note = 2'-O-methyluridine-3'-phosphate
  modified_base 7: mod_base = OTHER; note = 2'-deoxy-2'-fluoroadenosine-3'-phosphate
  modified_base 8: mod_base = OTHER; note = 2'-O-methyluridine-3'-phosphate
  modified_base 9: mod_base = OTHER; note = 2'-deoxy-2'-fluorocytidine-3'-phosphate
  modified_base 10: mod_base = OTHER; note = 2'-deoxy-2'-fluorouridine-3'-phosphate
  modified_base 11: mod_base = OTHER; note = 2'-deoxy-2'-fluorocytidine-3'-phosphate
  modified_base 12: mod_base = OTHER; note = 2'-O-methylcytidine-3'-phosphate
  modified_base 13: mod_base = OTHER; note = 2'-O-methyladenosine-3'-phosphate
  modified_base 14: mod_base = OTHER; note = 2'-O-methyladenosine-3'-phosphate
  modified_base 15: mod_base = OTHER; note = 2'-O-methyladenosine-3'-phosphate
  modified_base 16: mod_base = OTHER; note = 2'-O-methylguanosine-3'-phosphate
  modified_base 17: mod_base = OTHER; note = 2'-O-methylcytidine-3'-phosphate
  modified_base 18: mod_base = OTHER; note = 2'-O-methylcytidine-3'-phosphate
  modified_base 19: mod_base = OTHER; note = 2'-O-methyladenosine-3'-phosphate
  modified_base 20: mod_base = OTHER; note = 2'-O-methylcytidine-3'-phosphate
  modified_base 21: mod_base = OTHER; note = 2'-O-methyluridine-3'-phosphate ((2S,4R)-1-[29-[[2-(acetylamino)-2-deoxy-beta-D-galactopyra nosyl]oxy]-14,14-bis[[3-[[3-[[5-[[2-(acetylamino)-2-deoxy-b eta-D-galactopyranosyl]oxy]-1-oxopentyl]amino]propyl]amino] -3-oxopropoxy]methyl]-1,12,19,25-tetraoxo-16-oxa-13,20,24-t riazanonacos-1-yl]-4-hydroxy-2-pyrrolidinyl)methyl ester
catgttatctccaaagccact

SEQ ID NO: 1832 - RNA, 21 nt, synthetic construct
  source 1..21: mol_type = other RNA
  modified_base 1: mod_base = OTHER; note = 2'-O-methyluridine-3'-phosphorothioate
  modified_base 2: mod_base = OTHER; note = 2'-O-methylcytidine-3'-phosphorothioate
  modified_base 3: mod_base = OTHER; note = 2'-O-methylcytidine-3'-phosphate
  modified_base 4: mod_base = OTHER; note = 2'-O-methyladenosine-3'-phosphate
  modified_base 5: mod_base = OTHER; note = 2'-O-methyladenosine-3'-phosphate
  modified_base 6: mod_base = OTHER; note = 2'-O-methyladenosine-3'-phosphate
  modified_base 7: mod_base = OTHER; note = 2'-deoxy-2'-fluoroguanosine-3'-phosphate
  modified_base 8: mod_base = OTHER; note = 2'-O-methylcytidine-3'-phosphate
  modified_base 9: mod_base = OTHER; note = 2'-deoxy-2'-fluorocytidine-3'-phosphate
  modified_base 10: mod_base = OTHER; note = 2'-deoxy-2'-fluoroadenosine-3'-phosphate
  modified_base 11: mod_base = OTHER; note = 2'-deoxy-2'-fluorocytidine-3'-phosphate
  modified_base 12: mod_base = OTHER; note = 2'-O-methyladenosine-3'-phosphate
  modified_base 13: mod_base = OTHER; note = 2'-O-methylguanosine-3'-phosphate
  modified_base 14: mod_base = OTHER; note = 2'-O-methyladenosine-3'-phosphate
  modified_base 15: mod_base = OTHER; note = 2'-O-methyladenosine-3'-phosphate
  modified_base 16: mod_base = OTHER; note = 2'-O-methylguanosine-3'-phosphate
  modified_base 17: mod_base = OTHER; note = 2'-O-methyladenosine-3'-phosphate
  modified_base 18: mod_base = OTHER; note = 2'-O-methyladenosine-3'-phosphate
  modified_base 19: mod_base = OTHER; note = 2'-O-methyladenosine-3'-phosphate
  modified_base 20: mod_base = OTHER; note = 2'-O-methyluridine-3'-phosphate
  modified_base 21: mod_base = OTHER; note = 2'-O-methyluridine-3'-phosphate ((2S,4R)-1-[29-[[2-(acetylamino)-2-deoxy-beta-D-galactopyra nosyl]oxy]-14,14-bis[[3-[[3-[[5-[[2-(acetylamino)-2-deoxy-b eta-D-galactopyranosyl]oxy]-1-oxopentyl]amino]propyl]amino] -3-oxopropoxy]methyl]-1,12,19,25-tetraoxo-16-oxa-13,20,24-t riazanonacos-1-yl]-4-hydroxy-2-pyrrolidinyl)methyl ester
tccaaagccacagaagaaatt

SEQ ID NO: 1833 - RNA, 21 nt, synthetic construct
  source 1..21: mol_type = other RNA
  modified_base 1: mod_base = OTHER; note = 2'-O-methyladenosine-3'-phosphorothioate
  modified_base 2: mod_base = OTHER; note = 2'-O-methylguanosine-3'-phosphorothioate
  modified_base 3: mod_base = OTHER; note = 2'-O-methylcytidine-3'-phosphate
  modified_base 4: mod_base = OTHER; note = 2'-O-methylcytidine-3'-phosphate
  modified_base 5: mod_base = OTHER; note = 2'-O-methyladenosine-3'-phosphate
  modified_base 6: mod_base = OTHER; note = 2'-O-methylcytidine-3'-phosphate
  modified_base 7: mod_base = OTHER; note = 2'-deoxy-2'-fluoroadenosine-3'-phosphate
  modified_base 8: mod_base = OTHER; note = 2'-O-methylguanosine-3'-phosphate
  modified_base 9: mod_base = OTHER; note = 2'-deoxy-2'-fluoroadenosine-3'-phosphate
  modified_base 10: mod_base = OTHER; note = 2'-deoxy-2'-fluoroadenosine-3'-phosphate
  modified_base 11: mod_base = OTHER; note = 2'-deoxy-2'-fluoroguanosine-3'-phosphate
  modified_base 12: mod_base = OTHER; note = 2'-O-methyladenosine-3'-phosphate
  modified_base 13: mod_base = OTHER; note = 2'-O-methyladenosine-3'-phosphate
  modified_base 14: mod_base = OTHER; note = 2'-O-methyladenosine-3'-phosphate
  modified_base 15: mod_base = OTHER; note = 2'-O-methyluridine-3'-phosphate
  modified_base 16: mod_base = OTHER; note = 2'-O-methyluridine-3'-phosphate
  modified_base 17: mod_base = OTHER; note = 2'-O-methyluridine-3'-phosphate
  modified_base 18: mod_base = OTHER; note = 2'-O-methylguanosine-3'-phosphate
  modified_base 19: mod_base = OTHER; note = 2'-O-methyluridine-3'-phosphate
  modified_base 20: mod_base = OTHER; note = 2'-O-methylguanosine-3'-phosphate
  modified_base 21: mod_base = OTHER; note = 2'-O-methyluridine-3'-phosphate ((2S,4R)-1-[29-[[2-(acetylamino)-2-deoxy-beta-D-galactopyra nosyl]oxy]-14,14-bis[[3-[[3-[[5-[[2-(acetylamino)-2-deoxy-b eta-D-galactopyranosyl]oxy]-1-oxopentyl]amino]propyl]amino] -3-oxopropoxy]methyl]-1,12,19,25-tetraoxo-16-oxa-13,20,24-t riazanonacos-1-yl]-4-hydroxy-2-pyrrolidinyl)methyl ester
agccacagaagaaatttgtgt

SEQ ID NO: 1834 - RNA, 21 nt, synthetic construct
  source 1..21: mol_type = other RNA
  modified_base 1: mod_base = OTHER; note = 2'-O-methylcytidine-3'-phosphorothioate
  modified_base 2: mod_base = OTHER; note = 2'-O-methyladenosine-3'-phosphorothioate
  modified_base 3: mod_base = OTHER; note = 2'-O-methylguanosine-3'-phosphate
  modified_base 4: mod_base = OTHER; note = 2'-O-methyladenosine-3'-phosphate
  modified_base 5: mod_base = OTHER; note = 2'-O-methyladenosine-3'-phosphate
  modified_base 6: mod_base = OTHER; note = 2'-O-methylguanosine-3'-phosphate
  modified_base 7: mod_base = OTHER; note = 2'-deoxy-2'-fluoroadenosine-3'-phosphate
  modified_base 8: mod_base = OTHER; note = 2'-O-methyladenosine-3'-phosphate
  modified_base 9: mod_base = OTHER; note = 2'-deoxy-2'-fluoroadenosine-3'-phosphate
  modified_base 10: mod_base = OTHER; note = 2'-deoxy-2'-fluorouridine-3'-phosphate
  modified_base 11: mod_base = OTHER; note = 2'-deoxy-2'-fluorouridine-3'-phosphate
  modified_base 12: mod_base = OTHER; note = 2'-O-methyluridine-3'-phosphate
  modified_base 13: mod_base = OTHER; note = 2'-O-methylguanosine-3'-phosphate
  modified_base 14: mod_base = OTHER; note = 2'-O-methyluridine-3'-phosphate
  modified_base 15: mod_base = OTHER; note = 2'-O-methylguanosine-3'-phosphate
  modified_base 16: mod_base = OTHER; note = 2'-O-methylguanosine-3'-phosphate
  modified_base 17: mod_base = OTHER; note = 2'-O-methyladenosine-3'-phosphate
  modified_base 18: mod_base = OTHER; note = 2'-O-methylcytidine-3'-phosphate
  modified_base 19: mod_base = OTHER; note = 2'-O-methylcytidine-3'-phosphate
  modified_base 20: mod_base = OTHER; note = 2'-O-methyladenosine-3'-phosphate
  modified_base 21: mod_base = OTHER; note = 2'-O-methyluridine-3'-phosphate ((2S,4R)-1-[29-[[2-(acetylamino)-2-deoxy-beta-D-galactopyra nosyl]oxy]-14,14-bis[[3-[[3-[[5-[[2-(acetylamino)-2-deoxy-b eta-D-galactopyranosyl]oxy]-1-oxopentyl]amino]propyl]amino] -3-oxopropoxy]methyl]-1,12,19,25-tetraoxo-16-oxa-13,20,24-t riazanonacos-1-yl]-4-hydroxy-2-pyrrolidinyl)methyl ester
cagaagaaatttgtggaccat

SEQ ID NO: 1835 - RNA, 21 nt, synthetic construct
  source 1..21: mol_type = other RNA
  modified_base 1: mod_base = OTHER; note = 2'-O-methylguanosine-3'-phosphorothioate
  modified_base 2: mod_base = OTHER; note = 2'-O-methyladenosine-3'-phosphorothioate
  modified_base 3: mod_base = OTHER; note = 2'-O-methyladenosine-3'-phosphate
  modified_base 4: mod_base = OTHER; note = 2'-O-methyladenosine-3'-phosphate
  modified_base 5: mod_base = OTHER; note = 2'-O-methyluridine-3'-phosphate
  modified_base 6: mod_base = OTHER; note = 2'-O-methyluridine-3'-phosphate
  modified_base 7: mod_base = OTHER; note = 2'-deoxy-2'-fluorouridine-3'-phosphate
  modified_base 8: mod_base = OTHER; note = 2'-O-methylguanosine-3'-phosphate
  modified_base 9: mod_base = OTHER; note = 2'-deoxy-2'-fluorouridine-3'-phosphate
  modified_base 10: mod_base = OTHER; note = 2'-deoxy-2'-fluoroguanosine-3'-phosphate
  modified_base 11: mod_base = OTHER; note = 2'-deoxy-2'-fluoroguanosine-3'-phosphate
  modified_base 12: mod_base = OTHER; note = 2'-O-methyladenosine-3'-phosphate
  modified_base 13: mod_base = OTHER; note = 2'-O-methylcytidine-3'-phosphate
  modified_base 14: mod_base = OTHER; note = 2'-O-methylcytidine-3'-phosphate
  modified_base 15: mod_base = OTHER; note = 2'-O-methyladenosine-3'-phosphate
  modified_base 16: mod_base = OTHER; note = 2'-O-methylguanosine-3'-phosphate
  modified_base 17: mod_base = OTHER; note = 2'-O-methylguanosine-3'-phosphate
  modified_base 18: mod_base = OTHER; note = 2'-O-methylcytidine-3'-phosphate
  modified_base 19: mod_base = OTHER; note = 2'-O-methyluridine-3'-phosphate
  modified_base 20: mod_base = OTHER; note = 2'-O-methyluridine-3'-phosphate
  modified_base 21: mod_base = OTHER; note = 2'-O-methyluridine-3'-phosphate ((2S,4R)-1-[29-[[2-(acetylamino)-2-deoxy-beta-D-galactopyra nosyl]oxy]-14,14-bis[[3-[[3-[[5-[[2-(acetylamino)-2-deoxy-b eta-D-galactopyranosyl]oxy]-1-oxopentyl]amino]propyl]amino] -3-oxopropoxy]methyl]-1,12,19,25-tetraoxo-16-oxa-13,20,24-t riazanonacos-1-yl]-4-hydroxy-2-pyrrolidinyl)methyl ester
gaaatttgtggaccaggcttt

SEQ ID NO: 1836 - RNA, 21 nt, synthetic construct
  source 1..21: mol_type = other RNA
  modified_base 1: mod_base = OTHER; note = 2'-O-methyladenosine-3'-phosphorothioate
  modified_base 2: mod_base = OTHER; note = 2'-O-methylcytidine-3'-phosphorothioate
  modified_base 3: mod_base = OTHER; note = 2'-O-methylcytidine-3'-phosphate
  modified_base 4: mod_base = OTHER; note = 2'-O-methyladenosine-3'-phosphate
  modified_base 5: mod_base = OTHER; note = 2'-O-methylguanosine-3'-phosphate
  modified_base 6: mod_base = OTHER; note = 2'-O-methylguanosine-3'-phosphate
  modified_base 7: mod_base = OTHER; note = 2'-deoxy-2'-fluorocytidine-3'-phosphate
  modified_base 8: mod_base = OTHER; note = 2'-O-methyluridine-3'-phosphate
  modified_base 9: mod_base = OTHER; note = 2'-deoxy-2'-fluorouridine-3'-phosphate
  modified_base 10: mod_base = OTHER; note = 2'-deoxy-2'-fluoroguanosine-3'-phosphate
  modified_base 11: mod_base = OTHER; note = 2'-deoxy-2'-fluorouridine-3'-phosphate
  modified_base 12: mod_base = OTHER; note = 2'-O-methylguanosine-3'-phosphate
  modified_base 13: mod_base = OTHER; note = 2'-O-methylguanosine-3'-phosphate
  modified_base 14: mod_base = OTHER; note = 2'-O-methylcytidine-3'-phosphate
  modified_base 15: mod_base = OTHER; note = 2'-O-methylcytidine-3'-phosphate
  modified_base 16: mod_base = OTHER; note = 2'-O-methylcytidine-3'-phosphate
  modified_base 17: mod_base = OTHER; note = 2'-O-methyladenosine-3'-phosphate
  modified_base 18: mod_base = OTHER; note = 2'-O-methyladenosine-3'-phosphate
  modified_base 19: mod_base = OTHER; note = 2'-O-methylguanosine-3'-phosphate
  modified_base 20: mod_base = OTHER; note = 2'-O-methyluridine-3'-phosphate
  modified_base 21: mod_base = OTHER; note = 2'-O-methyluridine-3'-phosphate ((2S,4R)-1-[29-[[2-(acetylamino)-2-deoxy-beta-D-galactopyra nosyl]oxy]-14,14-bis[[3-[[3-[[5-[[2-(acetylamino)-2-deoxy-b eta-D-galactopyranosyl]oxy]-1-oxopentyl]amino]propyl]amino] -3-oxopropoxy]methyl]-1,12,19,25-tetraoxo-16-oxa-13,20,24-t riazanonacos-1-yl]-4-hydroxy-2-pyrrolidinyl)methyl ester
accaggcttgtggcccaagtt

SEQ ID NO: 1837 - RNA, 21 nt, synthetic construct
  source 1..21: mol_type = other RNA
  modified_base 1: mod_base = OTHER; note = 2'-O-methyluridine-3'-phosphorothioate
  modified_base 2: mod_base = OTHER; note = 2'-O-methylguanosine-3'-phosphorothioate
  modified_base 3: mod_base = OTHER; note = 2'-O-methyluridine-3'-phosphate
  modified_base 4: mod_base = OTHER; note = 2'-O-methylguanosine-3'-phosphate
  modified_base 5: mod_base = OTHER; note = 2'-O-methylguanosine-3'-phosphate
  modified_base 6: mod_base = OTHER; note = 2'-O-methylcytidine-3'-phosphate
  modified_base 7: mod_base = OTHER; note = 2'-deoxy-2'-fluorocytidine-3'-phosphate
  modified_base 8: mod_base = OTHER; note = 2'-O-methylcytidine-3'-phosphate
  modified_base 9: mod_base = OTHER; note = 2'-deoxy-2'-fluoroadenosine-3'-phosphate
  modified_base 10: mod_base = OTHER; note = 2'-deoxy-2'-fluoroadenosine-3'-phosphate
  modified_base 11: mod_base = OTHER; note = 2'-deoxy-2'-fluoroguanosine-3'-phosphate
  modified_base 12: mod_base = OTHER; note = 2'-O-methyluridine-3'-phosphate
  modified_base 13: mod_base = OTHER; note = 2'-O-methylcytidine-3'-phosphate
  modified_base 14: mod_base = OTHER; note = 2'-O-methyladenosine-3'-phosphate
  modified_base 15: mod_base = OTHER; note = 2'-O-methyluridine-3'-phosphate
  modified_base 16: mod_base = OTHER; note = 2'-O-methyluridine-3'-phosphate
  modified_base 17: mod_base = OTHER; note = 2'-O-methylcytidine-3'-phosphate
  modified_base 18: mod_base = OTHER; note = 2'-O-methyladenosine-3'-phosphate
  modified_base 19: mod_base = OTHER; note = 2'-O-methyladenosine-3'-phosphate
  modified_base 20: mod_base = OTHER; note = 2'-O-methyladenosine-3'-phosphate
  modified_base 21: mod_base = OTHER; note = 2'-O-methyluridine-3'-phosphate ((2S,4R)-1-[29-[[2-(acetylamino)-2-deoxy-beta-D-galactopyra nosyl]oxy]-14,14-bis[[3-[[3-[[5-[[2-(acetylamino)-2-deoxy-b eta-D-galactopyranosyl]oxy]-1-oxopentyl]amino]propyl]amino] -3-oxopropoxy]methyl]-1,12,19,25-tetraoxo-16-oxa-13,20,24-t riazanonacos-1-yl]-4-hydroxy-2-pyrrolidinyl)methyl ester
tgtggcccaagtcattcaaat

SEQ ID NO: 1838 - RNA, 21 nt, synthetic construct
  source 1..21: mol_type = other RNA
  modified_base 1: mod_base = OTHER; note = 2'-O-methylcytidine-3'-phosphorothioate
  modified_base 2: mod_base = OTHER; note = 2'-O-methylcytidine-3'-phosphorothioate
  modified_base 3: mod_base = OTHER; note = 2'-O-methylcytidine-3'-phosphate
  modified_base 4: mod_base = OTHER; note = 2'-O-methyladenosine-3'-phosphate
  modified_base 5: mod_base = OTHER; note = 2'-O-methyladenosine-3'-phosphate
  modified_base 6: mod_base = OTHER; note = 2'-O-methylguanosine-3'-phosphate
  modified_base 7: mod_base = OTHER; note = 2'-deoxy-2'-fluorouridine-3'-phosphate
  modified_base 8: mod_base = OTHER; note = 2'-O-methylcytidine-3'-phosphate
  modified_base 9: mod_base = OTHER; note = 2'-deoxy-2'-fluoroadenosine-3'-phosphate
  modified_base 10: mod_base = OTHER; note = 2'-deoxy-2'-fluorouridine-3'-phosphate
  modified_base 11: mod_base = OTHER; note = 2'-deoxy-2'-fluorouridine-3'-phosphate
  modified_base 12: mod_base = OTHER; note = 2'-O-methylcytidine-3'-phosphate
  modified_base 13: mod_base = OTHER; note = 2'-O-methyladenosine-3'-phosphate
  modified_base 14: mod_base = OTHER; note = 2'-O-methyladenosine-3'-phosphate
  modified_base 15: mod_base = OTHER; note = 2'-O-methyladenosine-3'-phosphate
  modified_base 16: mod_base = OTHER; note = 2'-O-methyladenosine-3'-phosphate
  modified_base 17: mod_base = OTHER; note = 2'-O-methylguanosine-3'-phosphate
  modified_base 18: mod_base = OTHER; note = 2'-O-methyladenosine-3'-phosphate
  modified_base 19: mod_base = OTHER; note = 2'-O-methyladenosine-3'-phosphate
  modified_base 20: mod_base = OTHER; note = 2'-O-methyladenosine-3'-phosphate
  modified_base 21: mod_base = OTHER; note = 2'-O-methyluridine-3'-phosphate ((2S,4R)-1-[29-[[2-(acetylamino)-2-deoxy-beta-D-galactopyra nosyl]oxy]-14,14-bis[[3-[[3-[[5-[[2-(acetylamino)-2-deoxy-b eta-D-galactopyranosyl]oxy]-1-oxopentyl]amino]propyl]amino] -3-oxopropoxy]methyl]-1,12,19,25-tetraoxo-16-oxa-13,20,24-t riazanonacos-1-yl]-4-hydroxy-2-pyrrolidinyl)methyl ester
cccaagtcattcaaaagaaat

SEQ ID NO: 1839 - RNA, 21 nt, synthetic construct
  source 1..21: mol_type = other RNA
  modified_base 1: mod_base = OTHER; note = 2'-O-methylcytidine-3'-phosphorothioate
  modified_base 2: mod_base = OTHER; note = 2'-O-methyladenosine-3'-phosphorothioate
  modified_base 3: mod_base = OTHER; note = 2'-O-methyluridine-3'-phosphate
  modified_base 4: mod_base = OTHER; note = 2'-O-methyluridine-3'-phosphate
  modified_base 5: mod_base = OTHER; note = 2'-O-methylcytidine-3'-phosphate
  modified_base 6: mod_base = OTHER; note = 2'-O-methyladenosine-3'-phosphate
  modified_base 7: mod_base = OTHER; note = 2'-deoxy-2'-fluoroadenosine-3'-phosphate
  modified_base 8: mod_base = OTHER; note = 2'-O-methyladenosine-3'-phosphate
  modified_base 9: mod_base = OTHER; note = 2'-deoxy-2'-fluoroadenosine-3'-phosphate
  modified_base 10: mod_base = OTHER; note = 2'-deoxy-2'-fluoroguanosine-3'-phosphate
  modified_base 11: mod_base = OTHER; note = 2'-deoxy-2'-fluoroadenosine-3'-phosphate
  modified_base 12: mod_base = OTHER; note = 2'-O-methyladenosine-3'-phosphate
  modified_base 13: mod_base = OTHER; note = 2'-O-methyladenosine-3'-phosphate
  modified_base 14: mod_base = OTHER; note = 2'-O-methylguanosine-3'-phosphate
  modified_base 15: mod_base = OTHER; note = 2'-O-methyluridine-3'-phosphate
  modified_base 16: mod_base = OTHER; note = 2'-O-methyladenosine-3'-phosphate
  modified_base 17: mod_base = OTHER; note = 2'-O-methyluridine-3'-phosphate
  modified_base 18: mod_base = OTHER; note = 2'-O-methylguanosine-3'-phosphate
  modified_base 19: mod_base = OTHER; note = 2'-O-methylguanosine-3'-phosphate
  modified_base 20: mod_base = OTHER; note = 2'-O-methyluridine-3'-phosphate
  modified_base 21: mod_base = OTHER; note = 2'-O-methyluridine-3'-phosphate ((2S,4R)-1-[29-[[2-(acetylamino)-2-deoxy-beta-D-galactopyra nosyl]oxy]-14,14-bis[[3-[[3-[[5-[[2-(acetylamino)-2-deoxy-b eta-D-galactopyranosyl]oxy]-1-oxopentyl]amino]propyl]amino] -3-oxopropoxy]methyl]-1,12,19,25-tetraoxo-16-oxa-13,20,24-t riazanonacos-1-yl]-4-hydroxy-2-pyrrolidinyl)methyl ester
cattcaaaagaaagtatggtt

SEQ ID NO: 1840 - RNA, 21 nt, synthetic construct
  source 1..21: mol_type = other RNA
  modified_base 1: mod_base = OTHER; note = 2'-O-methyladenosine-3'-phosphorothioate
  modified_base 2: mod_base = OTHER; note = 2'-O-methyladenosine-3'-phosphorothioate
  modified_base 3: mod_base = OTHER; note = 2'-O-methyladenosine-3'-phosphate
  modified_base 4: mod_base = OTHER; note = 2'-O-methyladenosine-3'-phosphate
  modified_base 5: mod_base = OTHER; note = 2'-O-methylguanosine-3'-phosphate
  modified_base 6: mod_base = OTHER; note = 2'-O-methyladenosine-3'-phosphate
  modified_base 7: mod_base = OTHER; note = 2'-deoxy-2'-fluoroadenosine-3'-phosphate
  modified_base 8: mod_base = OTHER; note = 2'-O-methyladenosine-3'-phosphate
  modified_base 9: mod_base = OTHER; note = 2'-deoxy-2'-fluoroguanosine-3'-phosphate
  modified_base 10: mod_base = OTHER; note = 2'-deoxy-2'-fluorouridine-3'-phosphate
  modified_base 11: mod_base = OTHER; note = 2'-deoxy-2'-fluoroadenosine-3'-phosphate
  modified_base 12: mod_base = OTHER; note = 2'-O-methyluridine-3'-phosphate
  modified_base 13: mod_base = OTHER; note = 2'-O-methylguanosine-3'-phosphate
  modified_base 14: mod_base = OTHER; note = 2'-O-methylguanosine-3'-phosphate
  modified_base 15: mod_base = OTHER; note = 2'-O-methyluridine-3'-phosphate
  modified_base 16: mod_base = OTHER; note = 2'-O-methylguanosine-3'-phosphate
  modified_base 17: mod_base = OTHER; note = 2'-O-methyladenosine-3'-phosphate
  modified_base 18: mod_base = OTHER; note = 2'-O-methylguanosine-3'-phosphate
  modified_base 19: mod_base = OTHER; note = 2'-O-methyluridine-3'-phosphate
  modified_base 20: mod_base = OTHER; note = 2'-O-methylcytidine-3'-phosphate
  modified_base 21: mod_base = OTHER; note = 2'-O-methyluridine-3'-phosphate ((2S,4R)-1-[29-[[2-(acetylamino)-2-deoxy-beta-D-galactopyra nosyl]oxy]-14,14-bis[[3-[[3-[[5-[[2-(acetylamino)-2-deoxy-b eta-D-galactopyranosyl]oxy]-1-oxopentyl]amino]propyl]amino] -3-oxopropoxy]methyl]-1,12,19,25-tetraoxo-16-oxa-13,20,24-t riazanonacos-1-yl]-4-hydroxy-2-pyrrolidinyl)methyl ester
aaaagaaagtatggtgagtct

SEQ ID NO: 1841 - RNA, 21 nt, synthetic construct
  source 1..21: mol_type = other RNA
  modified_base 1: mod_base = OTHER; note = 2'-O-methyladenosine-3'-phosphorothioate
  modified_base 2: mod_base = OTHER; note = 2'-O-methylguanosine-3'-phosphorothioate
  modified_base 3: mod_base = OTHER; note = 2'-O-methyluridine-3'-phosphate
  modified_base 4: mod_base = OTHER; note = 2'-O-methyladenosine-3'-phosphate
  modified_base 5: mod_base = OTHER; note = 2'-O-methyluridine-3'-phosphate
  modified_base 6: mod_base = OTHER; note = 2'-O-methylguanosine-3'-phosphate
  modified_base 7: mod_base = OTHER; note = 2'-deoxy-2'-fluoroguanosine-3'-phosphate
  modified_base 8: mod_base = OTHER; note = 2'-O-methyluridine-3'-phosphate
  modified_base 9: mod_base = OTHER; note = 2'-deoxy-2'-fluoroguanosine-3'-phosphate
  modified_base 10: mod_base = OTHER; note = 2'-deoxy-2'-fluoroadenosine-3'-phosphate
  modified_base 11: mod_base = OTHER; note = 2'-deoxy-2'-fluoroguanosine-3'-phosphate
  modified_base 12: mod_base = OTHER; note = 2'-O-methyluridine-3'-phosphate
  modified_base 13: mod_base = OTHER; note = 2'-O-methylcytidine-3'-phosphate
  modified_base 14: mod_base = OTHER; note = 2'-O-methylcytidine-3'-phosphate
  modified_base 15: mod_base = OTHER; note = 2'-O-methylcytidine-3'-phosphate
  modified_base 16: mod_base = OTHER; note = 2'-O-methyladenosine-3'-phosphate
  modified_base 17: mod_base = OTHER; note = 2'-O-methyladenosine-3'-phosphate
  modified_base 18: mod_base = OTHER; note = 2'-O-methylguanosine-3'-phosphate
  modified_base 19: mod_base = OTHER; note = 2'-O-methyladenosine-3'-phosphate
  modified_base 20: mod_base = OTHER; note = 2'-O-methyluridine-3'-phosphate
  modified_base 21: mod_base = OTHER; note = 2'-O-methyluridine-3'-phosphate ((2S,4R)-1-[29-[[2-(acetylamino)-2-deoxy-beta-D-galactopyra nosyl]oxy]-14,14-bis[[3-[[3-[[5-[[2-(acetylamino)-2-deoxy-b eta-D-galactopyranosyl]oxy]-1-oxopentyl]amino]propyl]amino] -3-oxopropoxy]methyl]-1,12,19,25-tetraoxo-16-oxa-13,20,24-t riazanonacos-1-yl]-4-hydroxy-2-pyrrolidinyl)methyl ester
agtatggtgagtcccaagatt

SEQ ID NO: 1842 - RNA, 21 nt, synthetic construct
  source 1..21: mol_type = other RNA
  modified_base 1: mod_base = OTHER; note = 2'-O-methyluridine-3'-phosphorothioate
  modified_base 2: mod_base = OTHER; note = 2'-O-methylguanosine-3'-phosphorothioate
  modified_base 3: mod_base = OTHER; note = 2'-O-methyladenosine-3'-phosphate
  modified_base 4: mod_base = OTHER; note = 2'-O-methylguanosine-3'-phosphate
  modified_base 5: mod_base = OTHER; note = 2'-O-methyluridine-3'-phosphate
  modified_base 6: mod_base = OTHER; note = 2'-O-methylcytidine-3'-phosphate
  modified_base 7: mod_base = OTHER; note = 2'-deoxy-2'-fluorocytidine-3'-phosphate
  modified_base 8: mod_base = OTHER; note = 2'-O-methylcytidine-3'-phosphate
  modified_base 9: mod_base = OTHER; note = 2'-deoxy-2'-fluoroadenosine-3'-phosphate
  modified_base 10: mod_base = OTHER; note = 2'-deoxy-2'-fluoroadenosine-3'-phosphate
  modified_base 11: mod_base = OTHER; note = 2'-deoxy-2'-fluoroguanosine-3'-phosphate
  modified_base 12: mod_base = OTHER; note = 2'-O-methyladenosine-3'-phosphate
  modified_base 13: mod_base = OTHER; note = 2'-O-methyluridine-3'-phosphate
  modified_base 14: mod_base = OTHER; note = 2'-O-methylcytidine-3'-phosphate
  modified_base 15: mod_base = OTHER; note = 2'-O-methyluridine-3'-phosphate
  modified_base 16: mod_base = OTHER; note = 2'-O-methylcytidine-3'-phosphate
  modified_base 17: mod_base = OTHER; note = 2'-O-methyluridine-3'-phosphate
  modified_base 18: mod_base = OTHER; note = 2'-O-methylguanosine-3'-phosphate
  modified_base 19: mod_base = OTHER; note = 2'-O-methylcytidine-3'-phosphate
  modified_base 20: mod_base = OTHER; note = 2'-O-methyluridine-3'-phosphate
  modified_base 21: mod_base = OTHER; note = 2'-O-methyluridine-3'-phosphate ((2S,4R)-1-[29-[[2-(acetylamino)-2-deoxy-beta-D-galactopyra nosyl]oxy]-14,14-bis[[3-[[3-[[5-[[2-(acetylamino)-2-deoxy-b eta-D-galactopyranosyl]oxy]-1-oxopentyl]amino]propyl]amino] -3-oxopropoxy]methyl]-1,12,19,25-tetraoxo-16-oxa-13,20,24-t riazanonacos-1-yl]-4-hydroxy-2-pyrrolidinyl)methyl ester
tgagtcccaagatctctgctt

SEQ ID NO: 1843 - RNA, 21 nt, synthetic construct
  source 1..21: mol_type = other RNA
  modified_base 1: mod_base = OTHER; note = 2'-O-methylcytidine-3'-phosphorothioate
  modified_base 2: mod_base = OTHER; note = 2'-O-methylcytidine-3'-phosphorothioate
  modified_base 3: mod_base = OTHER; note = 2'-O-methylcytidine-3'-phosphate
  modified_base 4: mod_base = OTHER; note = 2'-O-methyladenosine-3'-phosphate
  modified_base 5: mod_base = OTHER; note = 2'-O-methyladenosine-3'-phosphate
  modified_base 6: mod_base = OTHER; note = 2'-O-methylguanosine-3'-phosphate
  modified_base 7: mod_base = OTHER; note = 2'-deoxy-2'-fluoroadenosine-3'-phosphate
  modified_base 8: mod_base = OTHER; note = 2'-O-methyluridine-3'-phosphate
  modified_base 9: mod_base = OTHER; note = 2'-deoxy-2'-fluorocytidine-3'-phosphate
  modified_base 10: mod_base = OTHER; note = 2'-deoxy-2'-fluorouridine-3'-phosphate
  modified_base 11: mod_base = OTHER; note = 2'-deoxy-2'-fluorocytidine-3'-phosphate
  modified_base 12: mod_base = OTHER; note = 2'-O-methyluridine-3'-phosphate
  modified_base 13: mod_base = OTHER; note = 2'-O-methylguanosine-3'-phosphate
  modified_base 14: mod_base = OTHER; note = 2'-O-methylcytidine-3'-phosphate
  modified_base 15: mod_base = OTHER; note = 2'-O-methyluridine-3'-phosphate
  modified_base 16: mod_base = OTHER; note = 2'-O-methylguanosine-3'-phosphate
  modified_base 17: mod_base = OTHER; note = 2'-O-methylguanosine-3'-phosphate
  modified_base 18: mod_base = OTHER; note = 2'-O-methyladenosine-3'-phosphate
  modified_base 19: mod_base = OTHER; note = 2'-O-methylcytidine-3'-phosphate
  modified_base 20: mod_base = OTHER; note = 2'-O-methyladenosine-3'-phosphate
  modified_base 21: mod_base = OTHER; note = 2'-O-methyluridine-3'-phosphate ((2S,4R)-1-[29-[[2-(acetylamino)-2-deoxy-beta-D-galactopyra nosyl]oxy]-14,14-bis[[3-[[3-[[5-[[2-(acetylamino)-2-deoxy-b eta-D-galactopyranosyl]oxy]-1-oxopentyl]amino]propyl]amino] -3-oxopropoxy]methyl]-1,12,19,25-tetraoxo-16-oxa-13,20,24-t riazanonacos-1-yl]-4-hydroxy-2-pyrrolidinyl)methyl ester
cccaagatctctgctggacat

SEQ ID NO: 1844 - RNA, 21 nt, synthetic construct
  source 1..21: mol_type = other RNA
  modified_base 1: mod_base = OTHER; note = 2'-O-methylguanosine-3'-phosphorothioate
  modified_base 2: mod_base = OTHER; note = 2'-O-methyladenosine-3'-phosphorothioate
  modified_base 3: mod_base = OTHER; note = 2'-O-methyluridine-3'-phosphate
  modified_base 4: mod_base = OTHER; note = 2'-O-methylcytidine-3'-phosphate
  modified_base 5: mod_base = OTHER; note = 2'-O-methyluridine-3'-phosphate
  modified_base 6: mod_base = OTHER; note = 2'-O-methylcytidine-3'-phosphate
  modified_base 7: mod_base = OTHER; note = 2'-deoxy-2'-fluorouridine-3'-phosphate
  modified_base 8: mod_base = OTHER; note = 2'-O-methylguanosine-3'-phosphate
  modified_base 9: mod_base = OTHER; note = 2'-deoxy-2'-fluorocytidine-3'-phosphate
  modified_base 10: mod_base = OTHER; note = 2'-deoxy-2'-fluorouridine-3'-phosphate
  modified_base 11: mod_base = OTHER; note = 2'-deoxy-2'-fluoroguanosine-3'-phosphate
  modified_base 12: mod_base = OTHER; note = 2'-O-methylguanosine-3'-phosphate
  modified_base 13: mod_base = OTHER; note = 2'-O-methyladenosine-3'-phosphate
  modified_base 14: mod_base = OTHER; note = 2'-O-methylcytidine-3'-phosphate
  modified_base 15: mod_base = OTHER; note = 2'-O-methyladenosine-3'-phosphate
  modified_base 16: mod_base = OTHER; note = 2'-O-methyluridine-3'-phosphate
  modified_base 17: mod_base = OTHER; note = 2'-O-methylcytidine-3'-phosphate
  modified_base 18: mod_base = OTHER; note = 2'-O-methyladenosine-3'-phosphate
  modified_base 19: mod_base = OTHER; note = 2'-O-methyladenosine-3'-phosphate
  modified_base 20: mod_base = OTHER; note = 2'-O-methylcytidine-3'-phosphate
  modified_base 21: mod_base = OTHER; note = 2'-O-methyluridine-3'-phosphate ((2S,4R)-1-[29-[[2-(acetylamino)-2-deoxy-beta-D-galactopyra nosyl]oxy]-14,14-bis[[3-[[3-[[5-[[2-(acetylamino)-2-deoxy-b eta-D-galactopyranosyl]oxy]-1-oxopentyl]amino]propyl]amino] -3-oxopropoxy]methyl]-1,12,19,25-tetraoxo-16-oxa-13,20,24-t riazanonacos-1-yl]-4-hydroxy-2-pyrrolidinyl)methyl ester
gatctctgctggacatcaact

SEQ ID NO: 1845 - RNA, 21 nt, synthetic construct
  source 1..21: mol_type = other RNA
  modified_base 1: mod_base = OTHER; note = 2'-O-methylcytidine-3'-phosphorothioate
  modified_base 2: mod_base = OTHER; note = 2'-O-methyluridine-3'-phosphorothioate
  modified_base 3: mod_base = OTHER; note = 2'-O-methylguanosine-3'-phosphate
  modified_base 4: mod_base = OTHER; note = 2'-O-methylcytidine-3'-phosphate
  modified_base 5: mod_base = OTHER; note = 2'-O-methyluridine-3'-phosphate
  modified_base 6: mod_base = OTHER; note = 2'-O-methylguanosine-3'-phosphate
  modified_base 7: mod_base = OTHER; note = 2'-deoxy-2'-fluoroguanosine-3'-phosphate
  modified_base 8: mod_base = OTHER; note = 2'-O-methyladenosine-3'-phosphate
  modified_base 9: mod_base = OTHER; note = 2'-deoxy-2'-fluorocytidine-3'-phosphate
  modified_base 10: mod_base = OTHER; note = 2'-deoxy-2'-fluoroadenosine-3'-phosphate
  modified_base 11: mod_base = OTHER; note = 2'-deoxy-2'-fluorouridine-3'-phosphate
  modified_base 12: mod_base = OTHER; note = 2'-O-methylcytidine-3'-phosphate
  modified_base 13: mod_base = OTHER; note = 2'-O-methyladenosine-3'-phosphate
  modified_base 14: mod_base = OTHER; note = 2'-O-methyladenosine-3'-phosphate
  modified_base 15: mod_base = OTHER; note = 2'-O-methylcytidine-3'-phosphate
  modified_base 16: mod_base = OTHER; note = 2'-O-methyladenosine-3'-phosphate
  modified_base 17: mod_base = OTHER; note = 2'-O-methylcytidine-3'-phosphate
  modified_base 18: mod_base = OTHER; note = 2'-O-methyluridine-3'-phosphate
  modified_base 19: mod_base = OTHER; note = 2'-O-methylguanosine-3'-phosphate
  modified_base 20: mod_base = OTHER; note = 2'-O-methyluridine-3'-phosphate
  modified_base 21: mod_base = OTHER; note = 2'-O-methyluridine-3'-phosphate ((2S,4R)-1-[29-[[2-(acetylamino)-2-deoxy-beta-D-galactopyra nosyl]oxy]-14,14-bis[[3-[[3-[[5-[[2-(acetylamino)-2-deoxy-b eta-D-galactopyranosyl]oxy]-1-oxopentyl]amino]propyl]amino] -3-oxopropoxy]methyl]-1,12,19,25-tetraoxo-16-oxa-13,20,24-t riazanonacos-1-yl]-4-hydroxy-2-pyrrolidinyl)methyl ester
ctgctggacatcaacactgtt

SEQ ID NO: 1846 - RNA, 21 nt, synthetic construct
  source 1..21: mol_type = other RNA
  modified_base 1: mod_base = OTHER; note = 2'-O-methylguanosine-3'-phosphorothioate
  modified_base 2: mod_base = OTHER; note = 2'-O-methyladenosine-3'-phosphorothioate
  modified_base 3: mod_base = OTHER; note = 2'-O-methylcytidine-3'-phosphate
  modified_base 4: mod_base = OTHER; note = 2'-O-methyladenosine-3'-phosphate
  modified_base 5: mod_base = OTHER; note = 2'-O-methyluridine-3'-phosphate
  modified_base 6: mod_base = OTHER; note = 2'-O-methylcytidine-3'-phosphate
  modified_base 7: mod_base = OTHER; note = 2'-deoxy-2'-fluoroadenosine-3'-phosphate
  modified_base 8: mod_base = OTHER; note = 2'-O-methyladenosine-3'-phosphate
  modified_base 9: mod_base = OTHER; note = 2'-deoxy-2'-fluorocytidine-3'-phosphate
  modified_base 10: mod_base = OTHER; note = 2'-deoxy-2'-fluoroadenosine-3'-phosphate
  modified_base 11: mod_base = OTHER; note = 2'-deoxy-2'-fluorocytidine-3'-phosphate
  modified_base 12: mod_base = OTHER; note = 2'-O-methyluridine-3'-phosphate
  modified_base 13: mod_base = OTHER; note = 2'-O-methylguanosine-3'-phosphate
  modified_base 14: mod_base = OTHER; note = 2'-O-methyluridine-3'-phosphate
  modified_base 15: mod_base = OTHER; note = 2'-O-methylguanosine-3'-phosphate
  modified_base 16: mod_base = OTHER; note = 2'-O-methylguanosine-3'-phosphate
  modified_base 17: mod_base = OTHER; note = 2'-O-methyluridine-3'-phosphate
  modified_base 18: mod_base = OTHER; note = 2'-O-methylcytidine-3'-phosphate
  modified_base 19: mod_base = OTHER; note = 2'-O-methyladenosine-3'-phosphate
  modified_base 20: mod_base = OTHER; note = 2'-O-methylguanosine-3'-phosphate
  modified_base 21: mod_base = OTHER; note = 2'-O-methyluridine-3'-phosphate ((2S,4R)-1-[29-[[2-(acetylamino)-2-deoxy-beta-D-galactopyra nosyl]oxy]-14,14-bis[[3-[[3-[[5-[[2-(acetylamino)-2-deoxy-b eta-D-galactopyranosyl]oxy]-1-oxopentyl]amino]propyl]amino] -3-oxopropoxy]methyl]-1,12,19,25-tetraoxo-16-oxa-13,20,24-t riazanonacos-1-yl]-4-hydroxy-2-pyrrolidinyl)methyl ester
gacatcaacactgtggtcagt

SEQ ID NO: 1847 - RNA, 21 nt, synthetic construct
  source 1..21: mol_type = other RNA
  modified_base 1: mod_base = OTHER; note = 2'-O-methyladenosine-3'-phosphorothioate
  modified_base 2: mod_base = OTHER; note = 2'-O-methylcytidine-3'-phosphorothioate
  modified_base 3: mod_base = OTHER; note = 2'-O-methyladenosine-3'-phosphate
  modified_base 4: mod_base = OTHER; note = 2'-O-methylcytidine-3'-phosphate
  modified_base 5: mod_base = OTHER; note = 2'-O-methyluridine-3'-phosphate
  modified_base 6: mod_base = OTHER; note = 2'-O-methylguanosine-3'-phosphate
  modified_base 7: mod_base = OTHER; note = 2'-deoxy-2'-fluorouridine-3'-phosphate
  modified_base 8: mod_base = OTHER; note = 2'-O-methylguanosine-3'-phosphate
  modified_base 9: mod_base = OTHER; note = 2'-deoxy-2'-fluoroguanosine-3'-phosphate
  modified_base 10: mod_base = OTHER; note = 2'-deoxy-2'-fluorouridine-3'-phosphate
  modified_base 11: mod_base = OTHER; note = 2'-deoxy-2'-fluorocytidine-3'-phosphate
  modified_base 12: mod_base = OTHER; note = 2'-O-methyladenosine-3'-phosphate
  modified_base 13: mod_base = OTHER; note = 2'-O-methylguanosine-3'-phosphate
  modified_base 14: mod_base = OTHER; note = 2'-O-methyladenosine-3'-phosphate
  modified_base 15: mod_base = OTHER; note = 2'-O-methylguanosine-3'-phosphate
  modified_base 16: mod_base = OTHER; note = 2'-O-methylcytidine-3'-phosphate
  modified_base 17: mod_base = OTHER; note = 2'-O-methyladenosine-3'-phosphate
  modified_base 18: mod_base = OTHER; note = 2'-O-methylguanosine-3'-phosphate
  modified_base 19: mod_base = OTHER; note = 2'-O-methylcytidine-3'-phosphate
  modified_base 20: mod_base = OTHER; note = 2'-O-methyluridine-3'-phosphate
  modified_base 21: mod_base = OTHER; note = 2'-O-methyluridine-3'-phosphate ((2S,4R)-1-[29-[[2-(acetylamino)-2-deoxy-beta-D-galactopyra nosyl]oxy]-14,14-bis[[3-[[3-[[5-[[2-(acetylamino)-2-deoxy-b eta-D-galactopyranosyl]oxy]-1-oxopentyl]amino]propyl]amino] -3-oxopropoxy]methyl]-1,12,19,25-tetraoxo-16-oxa-13,20,24-t riazanonacos-1-yl]-4-hydroxy-2-pyrrolidinyl)methyl ester
acactgtggtcagagcagctt

SEQ ID NO: 1848 - RNA, 21 nt, synthetic construct
  source 1..21: mol_type = other RNA
  modified_base 1: mod_base = OTHER; note = 2'-O-methylcytidine-3'-phosphorothioate
  modified_base 2: mod_base = OTHER; note = 2'-O-methyladenosine-3'-phosphorothioate
  modified_base 3: mod_base = OTHER; note = 2'-O-methyladenosine-3'-phosphate
  modified_base 4: mod_base = OTHER; note = 2'-O-methylcytidine-3'-phosphate
  modified_base 5: mod_base = OTHER; note = 2'-O-methyladenosine-3'-phosphate
  modified_base 6: mod_base = OTHER; note = 2'-O-methylcytidine-3'-phosphate
  modified_base 7: mod_base = OTHER; note = 2'-deoxy-2'-fluorouridine-3'-phosphate
  modified_base 8: mod_base = OTHER; note = 2'-O-methylcytidine-3'-phosphate
  modified_base 9: mod_base = OTHER; note = 2'-deoxy-2'-fluoroguanosine-3'-phosphate
  modified_base 10: mod_base = OTHER; note = 2'-deoxy-2'-fluoroguanosine-3'-phosphate
  modified_base 11: mod_base = OTHER; note = 2'-deoxy-2'-fluoroadenosine-3'-phosphate
  modified_base 12: mod_base = OTHER; note = 2'-O-methyluridine-3'-phosphate
  modified_base 13: mod_base = OTHER; note = 2'-O-methyluridine-3'-phosphate
  modified_base 14: mod_base = OTHER; note = 2'-O-methylguanosine-3'-phosphate
  modified_base 15: mod_base = OTHER; note = 2'-O-methyladenosine-3'-phosphate
  modified_base 16: mod_base = OTHER; note = 2'-O-methyladenosine-3'-phosphate
  modified_base 17: mod_base = OTHER; note = 2'-O-methylcytidine-3'-phosphate
  modified_base 18: mod_base = OTHER; note = 2'-O-methylcytidine-3'-phosphate
  modified_base 19: mod_base = OTHER; note = 2'-O-methyluridine-3'-phosphate
  modified_base 20: mod_base = OTHER; note = 2'-O-methyluridine-3'-phosphate
  modified_base 21: mod_base = OTHER; note = 2'-O-methyluridine-3'-phosphate ((2S,4R)-1-[29-[[2-(acetylamino)-2-deoxy-beta-D-galactopyra nosyl]oxy]-14,14-bis[[3-[[3-[[5-[[2-(acetylamino)-2-deoxy-b eta-D-galactopyranosyl]oxy]-1-oxopentyl]amino]propyl]amino] -3-oxopropoxy]methyl]-1,12,19,25-tetraoxo-16-oxa-13,20,24-t riazanonacos-1-yl]-4-hydroxy-2-pyrrolidinyl)methyl ester
caacactcggattgaaccttt

SEQ ID NO: 1849 - RNA, 21 nt, synthetic construct
  source 1..21: mol_type = other RNA
  modified_base 1: mod_base = OTHER; note = 2'-O-methylcytidine-3'-phosphorothioate
  modified_base 2: mod_base = OTHER; note = 2'-O-methyluridine-3'-phosphorothioate
  modified_base 3: mod_base = OTHER; note = 2'-O-methylcytidine-3'-phosphate
  modified_base 4: mod_base = OTHER; note = 2'-O-methylguanosine-3'-phosphate
  modified_base 5: mod_base = OTHER; note = 2'-O-methylguanosine-3'-phosphate
  modified_base 6: mod_base = OTHER; note = 2'-O-methyladenosine-3'-phosphate
  modified_base 7: mod_base = OTHER; note = 2'-deoxy-2'-fluorouridine-3'-phosphate
  modified_base 8: mod_base = OTHER; note = 2'-O-methyluridine-3'-phosphate
  modified_base 9: mod_base = OTHER; note = 2'-deoxy-2'-fluoroguanosine-3'-phosphate
  modified_base 10: mod_base = OTHER; note = 2'-deoxy-2'-fluoroadenosine-3'-phosphate
  modified_base 11: mod_base = OTHER; note = 2'-deoxy-2'-fluoroadenosine-3'-phosphate
  modified_base 12: mod_base = OTHER; note = 2'-O-methylcytidine-3'-phosphate
  modified_base 13: mod_base = OTHER; note = 2'-O-methylcytidine-3'-phosphate
  modified_base 14: mod_base = OTHER; note = 2'-O-methyluridine-3'-phosphate
  modified_base 15: mod_base = OTHER; note = 2'-O-methyluridine-3'-phosphate
  modified_base 16: mod_base = OTHER; note = 2'-O-methyladenosine-3'-phosphate
  modified_base 17: mod_base = OTHER; note = 2'-O-methylcytidine-3'-phosphate
  modified_base 18: mod_base = OTHER; note = 2'-O-methyluridine-3'-phosphate
  modified_base 19: mod_base = OTHER; note = 2'-O-methyladenosine-3'-phosphate
  modified_base 20: mod_base = OTHER; note = 2'-O-methylcytidine-3'-phosphate
  modified_base 21: mod_base = OTHER; note = 2'-O-methyluridine-3'-phosphate ((2S,4R)-1-[29-[[2-(acetylamino)-2-deoxy-beta-D-galactopyra nosyl]oxy]-14,14-bis[[3-[[3-[[5-[[2-(acetylamino)-2-deoxy-b eta-D-galactopyranosyl]oxy]-1-oxopentyl]amino]propyl]amino] -3-oxopropoxy]methyl]-1,12,19,25-tetraoxo-16-oxa-13,20,24-t riazanonacos-1-yl]-4-hydroxy-2-pyrrolidinyl)methyl ester
ctcggattgaaccttactact

SEQ ID NO: 1850 - RNA, 21 nt, synthetic construct
  source 1..21: mol_type = other RNA
  modified_base 1: mod_base = OTHER; note = 2'-O-methyluridine-3'-phosphorothioate
  modified_base 2: mod_base = OTHER; note = 2'-O-methyluridine-3'-phosphorothioate
  modified_base 3: mod_base = OTHER; note = 2'-O-methylguanosine-3'-phosphate
  modified_base 4: mod_base = OTHER; note = 2'-O-methyladenosine-3'-phosphate
  modified_base 5: mod_base = OTHER; note = 2'-O-methyladenosine-3'-phosphate
  modified_base 6: mod_base = OTHER; note = 2'-O-methylcytidine-3'-phosphate
  modified_base 7: mod_base = OTHER; note = 2'-deoxy-2'-fluorocytidine-3'-phosphate
  modified_base 8: mod_base = OTHER; note = 2'-O-methyluridine-3'-phosphate
  modified_base 9: mod_base = OTHER; note = 2'-deoxy-2'-fluorouridine-3'-phosphate
  modified_base 10: mod_base = OTHER; note = 2'-deoxy-2'-fluoroadenosine-3'-phosphate
  modified_base 11: mod_base = OTHER; note = 2'-deoxy-2'-fluorocytidine-3'-phosphate
  modified_base 12: mod_base = OTHER; note = 2'-O-methyluridine-3'-phosphate
  modified_base 13: mod_base = OTHER; note = 2'-O-methyladenosine-3'-phosphate
  modified_base 14: mod_base = OTHER; note = 2'-O-methylcytidine-3'-phosphate
  modified_base 15: mod_base = OTHER; note = 2'-O-methyladenosine-3'-phosphate
  modified_base 16: mod_base = OTHER; note = 2'-O-methylguanosine-3'-phosphate
  modified_base 17: mod_base = OTHER; note = 2'-O-methylcytidine-3'-phosphate
  modified_base 18: mod_base = OTHER; note = 2'-O-methyladenosine-3'-phosphate
  modified_base 19: mod_base = OTHER; note = 2'-O-methyluridine-3'-phosphate
  modified_base 20: mod_base = OTHER; note = 2'-O-methylcytidine-3'-phosphate
  modified_base 21: mod_base = OTHER; note = 2'-O-methyluridine-3'-phosphate ((2S,4R)-1-[29-[[2-(acetylamino)-2-deoxy-beta-D-galactopyra nosyl]oxy]-14,14-bis[[3-[[3-[[5-[[2-(acetylamino)-2-deoxy-b eta-D-galactopyranosyl]oxy]-1-oxopentyl]amino]propyl]amino] -3-oxopropoxy]methyl]-1,12,19,25-tetraoxo-16-oxa-13,20,24-t riazanonacos-1-yl]-4-hydroxy-2-pyrrolidinyl)methyl ester
ttgaaccttactacagcatct

SEQ ID NO: 1851 - RNA, 21 nt, synthetic construct
  source 1..21: mol_type = other RNA
  modified_base 1: mod_base = OTHER; note = 2'-O-methylcytidine-3'-phosphorothioate
  modified_base 2: mod_base = OTHER; note = 2'-O-methylcytidine-3'-phosphorothioate
  modified_base 3: mod_base = OTHER; note = 2'-O-methyluridine-3'-phosphate
  modified_base 4: mod_base = OTHER; note = 2'-O-methyluridine-3'-phosphate
  modified_base 5: mod_base = OTHER; note = 2'-O-methyladenosine-3'-phosphate
  modified_base 6: mod_base = OTHER; note = 2'-O-methylcytidine-3'-phosphate
  modified_base 7: mod_base = OTHER; note = 2'-deoxy-2'-fluorouridine-3'-phosphate
  modified_base 8: mod_base = OTHER; note = 2'-O-methyladenosine-3'-phosphate
  modified_base 9: mod_base = OTHER; note = 2'-deoxy-2'-fluorocytidine-3'-phosphate
  modified_base 10: mod_base = OTHER; note = 2'-deoxy-2'-fluoroadenosine-3'-phosphate
  modified_base 11: mod_base = OTHER; note = 2'-deoxy-2'-fluoroguanosine-3'-phosphate
  modified_base 12: mod_base = OTHER; note = 2'-O-methylcytidine-3'-phosphate
  modified_base 13: mod_base = OTHER; note = 2'-O-methyladenosine-3'-phosphate
  modified_base 14: mod_base = OTHER; note = 2'-O-methyluridine-3'-phosphate
  modified_base 15: mod_base = OTHER; note = 2'-O-methylcytidine-3'-phosphate
  modified_base 16: mod_base = OTHER; note = 2'-O-methyluridine-3'-phosphate
  modified_base 17: mod_base = OTHER; note = 2'-O-methyladenosine-3'-phosphate
  modified_base 18: mod_base = OTHER; note = 2'-O-methyluridine-3'-phosphate
  modified_base 19: mod_base = OTHER; note = 2'-O-methyladenosine-3'-phosphate
  modified_base 20: mod_base = OTHER; note = 2'-O-methyladenosine-3'-phosphate
  modified_base 21: mod_base = OTHER; note = 2'-O-methyluridine-3'-phosphate ((2S,4R)-1-[29-[[2-(acetylamino)-2-deoxy-beta-D-galactopyra nosyl]oxy]-14,14-bis[[3-[[3-[[5-[[2-(acetylamino)-2-deoxy-b eta-D-galactopyranosyl]oxy]-1-oxopentyl]amino]propyl]amino] -3-oxopropoxy]methyl]-1,12,19,25-tetraoxo-16-oxa-13,20,24-t riazanonacos-1-yl]-4-hydroxy-2-pyrrolidinyl)methyl ester
ccttactacagcatctataat

SEQ ID NO: 1852 - RNA, 21 nt, synthetic construct
  source 1..21: mol_type = other RNA
  modified_base 1: mod_base = OTHER; note = 2'-O-methylcytidine-3'-phosphorothioate
  modified_base 2: mod_base = OTHER; note = 2'-O-methyluridine-3'-phosphorothioate
  modified_base 3: mod_base = OTHER; note = 2'-O-methyladenosine-3'-phosphate
  modified_base 4: mod_base = OTHER; note = 2'-O-methylcytidine-3'-phosphate
  modified_base 5: mod_base = OTHER; note = 2'-O-methyladenosine-3'-phosphate
  modified_base 6: mod_base = OTHER; note = 2'-O-methylguanosine-3'-phosphate
  modified_base 7: mod_base = OTHER; note = 2'-deoxy-2'-fluorocytidine-3'-phosphate
  modified_base 8: mod_base = OTHER; note = 2'-O-methyladenosine-3'-phosphate
  modified_base 9: mod_base = OTHER; note = 2'-deoxy-2'-fluorouridine-3'-phosphate
  modified_base 10: mod_base = OTHER; note = 2'-deoxy-2'-fluorocytidine-3'-phosphate
  modified_base 11: mod_base = OTHER; note = 2'-deoxy-2'-fluorouridine-3'-phosphate
  modified_base 12: mod_base = OTHER; note = 2'-O-methyladenosine-3'-phosphate
  modified_base 13: mod_base = OTHER; note = 2'-O-methyluridine-3'-phosphate
  modified_base 14: mod_base = OTHER; note = 2'-O-methyladenosine-3'-phosphate
  modified_base 15: mod_base = OTHER; note = 2'-O-methyladenosine-3'-phosphate
  modified_base 16: mod_base = OTHER; note = 2'-O-methylcytidine-3'-phosphate
  modified_base 17: mod_base = OTHER; note = 2'-O-methyladenosine-3'-phosphate
  modified_base 18: mod_base = OTHER; note = 2'-O-methylguanosine-3'-phosphate
  modified_base 19: mod_base = OTHER; note = 2'-O-methylcytidine-3'-phosphate
  modified_base 20: mod_base = OTHER; note = 2'-O-methyladenosine-3'-phosphate
  modified_base 21: mod_base = OTHER; note = 2'-O-methyluridine-3'-phosphate ((2S,4R)-1-[29-[[2-(acetylamino)-2-deoxy-beta-D-galactopyra nosyl]oxy]-14,14-bis[[3-[[3-[[5-[[2-(acetylamino)-2-deoxy-b eta-D-galactopyranosyl]oxy]-1-oxopentyl]amino]propyl]amino] -3-oxopropoxy]methyl]-1,12,19,25-tetraoxo-16-oxa-13,20,24-t riazanonacos-1-yl]-4-hydroxy-2-pyrrolidinyl)methyl ester
ctacagcatctataacagcat

SEQ ID NO: 1853 - RNA, 21 nt, synthetic construct
  source 1..21: mol_type = other RNA
  modified_base 1: mod_base = OTHER; note = 2'-O-methylcytidine-3'-phosphorothioate
  modified_base 2: mod_base = OTHER; note = 2'-O-methyladenosine-3'-phosphorothioate
  modified_base 3: mod_base = OTHER; note = 2'-O-methyluridine-3'-phosphate
  modified_base 4: mod_base = OTHER; note = 2'-O-methylcytidine-3'-phosphate
  modified_base 5: mod_base = OTHER; note = 2'-O-methyluridine-3'-phosphate
  modified_base 6: mod_base = OTHER; note = 2'-O-methyladenosine-3'-phosphate
  modified_base 7: mod_base = OTHER; note = 2'-deoxy-2'-fluorouridine-3'-phosphate
  modified_base 8: mod_base = OTHER; note = 2'-O-methyladenosine-3'-phosphate
  modified_base 9: mod_base = OTHER; note = 2'-deoxy-2'-fluoroadenosine-3'-phosphate
  modified_base 10: mod_base = OTHER; note = 2'-deoxy-2'-fluorocytidine-3'-phosphate
  modified_base 11: mod_base = OTHER; note = 2'-deoxy-2'-fluoroadenosine-3'-phosphate
  modified_base 12: mod_base = OTHER; note = 2'-O-methylguanosine-3'-phosphate
  modified_base 13: mod_base = OTHER; note = 2'-O-methylcytidine-3'-phosphate
  modified_base 14: mod_base = OTHER; note = 2'-O-methyladenosine-3'-phosphate
  modified_base 15: mod_base = OTHER; note = 2'-O-methylguanosine-3'-phosphate
  modified_base 16: mod_base = OTHER; note = 2'-O-methylcytidine-3'-phosphate
  modified_base 17: mod_base = OTHER; note = 2'-O-methylcytidine-3'-phosphate
  modified_base 18: mod_base = OTHER; note = 2'-O-methylcytidine-3'-phosphate
  modified_base 19: mod_base = OTHER; note = 2'-O-methyluridine-3'-phosphate
  modified_base 20: mod_base = OTHER; note = 2'-O-methyluridine-3'-phosphate
  modified_base 21: mod_base = OTHER; note = 2'-O-methyluridine-3'-phosphate ((2S,4R)-1-[29-[[2-(acetylamino)-2-deoxy-beta-D-galactopyra nosyl]oxy]-14,14-bis[[3-[[3-[[5-[[2-(acetylamino)-2-deoxy-b eta-D-galactopyranosyl]oxy]-1-oxopentyl]amino]propyl]amino] -3-oxopropoxy]methyl]-1,12,19,25-tetraoxo-16-oxa-13,20,24-t riazanonacos-1-yl]-4-hydroxy-2-pyrrolidinyl)methyl ester
catctataacagcagcccttt

SEQ ID NO: 1854 - RNA, 21 nt, synthetic construct
  source 1..21: mol_type = other RNA
  modified_base 1: mod_base = OTHER; note = 2'-O-methylguanosine-3'-phosphorothioate
  modified_base 2: mod_base = OTHER; note = 2'-O-methyladenosine-3'-phosphorothioate
  modified_base 3: mod_base = OTHER; note = 2'-O-methylguanosine-3'-phosphate
  modified_base 4: mod_base = OTHER; note = 2'-O-methyladenosine-3'-phosphate
  modified_base 5: mod_base = OTHER; note = 2'-O-methylguanosine-3'-phosphate
  modified_base 6: mod_base = OTHER; note = 2'-O-methylcytidine-3'-phosphate
  modified_base 7: mod_base = OTHER; note = 2'-deoxy-2'-fluoroadenosine-3'-phosphate
  modified_base 8: mod_base = OTHER; note = 2'-O-methylguanosine-3'-phosphate
  modified_base 9: mod_base = OTHER; note = 2'-deoxy-2'-fluorocytidine-3'-phosphate
  modified_base 10: mod_base = OTHER; note = 2'-deoxy-2'-fluorocytidine-3'-phosphate
  modified_base 11: mod_base = OTHER; note = 2'-deoxy-2'-fluorocytidine-3'-phosphate
  modified_base 12: mod_base = OTHER; note = 2'-O-methyladenosine-3'-phosphate
  modified_base 13: mod_base = OTHER; note = 2'-O-methyluridine-3'-phosphate
  modified_base 14: mod_base = OTHER; note = 2'-O-methylguanosine-3'-phosphate
  modified_base 15: mod_base = OTHER; note = 2'-O-methyluridine-3'-phosphate
  modified_base 16: mod_base = OTHER; note = 2'-O-methyladenosine-3'-phosphate
  modified_base 17: mod_base = OTHER; note = 2'-O-methyladenosine-3'-phosphate
  modified_base 18: mod_base = OTHER; note = 2'-O-methylcytidine-3'-phosphate
  modified_base 19: mod_base = OTHER; note = 2'-O-methyluridine-3'-phosphate
  modified_base 20: mod_base = OTHER; note = 2'-O-methyluridine-3'-phosphate
  modified_base 21: mod_base = OTHER; note = 2'-O-methyluridine-3'-phosphate ((2S,4R)-1-[29-[[2-(acetylamino)-2-deoxy-beta-D-galactopyra nosyl]oxy]-14,14-bis[[3-[[3-[[5-[[2-(acetylamino)-2-deoxy-b eta-D-galactopyranosyl]oxy]-1-oxopentyl]amino]propyl]amino] -3-oxopropoxy]methyl]-1,12,19,25-tetraoxo-16-oxa-13,20,24-t riazanonacos-1-yl]-4-hydroxy-2-pyrrolidinyl)methyl ester
gagagcagcccatgtaacttt

SEQ ID NO: 1855 - RNA, 21 nt, synthetic construct
  source 1..21: mol_type = other RNA
  modified_base 1: mod_base = OTHER; note = 2'-O-methylcytidine-3'-phosphorothioate
  modified_base 2: mod_base = OTHER; note = 2'-O-methyladenosine-3'-phosphorothioate
  modified_base 3: mod_base = OTHER; note = 2'-O-methylguanosine-3'-phosphate
  modified_base 4: mod_base = OTHER; note = 2'-O-methylcytidine-3'-phosphate
  modified_base 5: mod_base = OTHER; note = 2'-O-methylcytidine-3'-phosphate
  modified_base 6: mod_base = OTHER; note = 2'-O-methylcytidine-3'-phosphate
  modified_base 7: mod_base = OTHER; note = 2'-deoxy-2'-fluoroadenosine-3'-phosphate
  modified_base 8: mod_base = OTHER; note = 2'-O-methyluridine-3'-phosphate
  modified_base 9: mod_base = OTHER; note = 2'-deoxy-2'-fluoroguanosine-3'-phosphate
  modified_base 10: mod_base = OTHER; note = 2'-deoxy-2'-fluorouridine-3'-phosphate
  modified_base 11: mod_base = OTHER; note = 2'-deoxy-2'-fluoroadenosine-3'-phosphate
  modified_base 12: mod_base = OTHER; note = 2'-O-methyladenosine-3'-phosphate
  modified_base 13: mod_base = OTHER; note = 2'-O-methylcytidine-3'-phosphate
  modified_base 14: mod_base = OTHER; note = 2'-O-methyluridine-3'-phosphate
  modified_base 15: mod_base = OTHER; note = 2'-O-methyluridine-3'-phosphate
  modified_base 16: mod_base = OTHER; note = 2'-O-methyladenosine-3'-phosphate
  modified_base 17: mod_base = OTHER; note = 2'-O-methylcytidine-3'-phosphate
  modified_base 18: mod_base = OTHER; note = 2'-O-methyladenosine-3'-phosphate
  modified_base 19: mod_base = OTHER; note = 2'-O-methylguanosine-3'-phosphate
  modified_base 20: mod_base = OTHER; note = 2'-O-methylcytidine-3'-phosphate
  modified_base 21: mod_base = OTHER; note = 2'-O-methyluridine-3'-phosphate ((2S,4R)-1-[29-[[2-(acetylamino)-2-deoxy-beta-D-galactopyra nosyl]oxy]-14,14-bis[[3-[[3-[[5-[[2-(acetylamino)-2-deoxy-b eta-D-galactopyranosyl]oxy]-1-oxopentyl]amino]propyl]amino] -3-oxopropoxy]methyl]-1,12,19,25-tetraoxo-16-oxa-13,20,24-t riazanonacos-1-yl]-4-hydroxy-2-pyrrolidinyl)methyl ester
cagcccatgtaacttacagct

SEQ ID NO: 1856 - RNA, 21 nt, synthetic construct
  source 1..21: mol_type = other RNA
  modified_base 1: mod_base = OTHER; note = 2'-O-methyladenosine-3'-phosphorothioate
  modified_base 2: mod_base = OTHER; note = 2'-O-methyluridine-3'-phosphorothioate
  modified_base 3: mod_base = OTHER; note = 2'-O-methylguanosine-3'-phosphate
  modified_base 4: mod_base = OTHER; note = 2'-O-methyluridine-3'-phosphate
  modified_base 5: mod_base = OTHER; note = 2'-O-methyladenosine-3'-phosphate
  modified_base 6: mod_base = OTHER; note = 2'-O-methyladenosine-3'-phosphate
  modified_base 7: mod_base = OTHER; note = 2'-deoxy-2'-fluorocytidine-3'-phosphate
  modified_base 8: mod_base = OTHER; note = 2'-O-methyluridine-3'-phosphate
  modified_base 9: mod_base = OTHER; note = 2'-deoxy-2'-fluorouridine-3'-phosphate
  modified_base 10: mod_base = OTHER; note = 2'-deoxy-2'-fluoroadenosine-3'-phosphate
  modified_base 11: mod_base = OTHER; note = 2'-deoxy-2'-fluorocytidine-3'-phosphate
  modified_base 12: mod_base = OTHER; note = 2'-O-methyladenosine-3'-phosphate
  modified_base 13: mod_base = OTHER; note = 2'-O-methylguanosine-3'-phosphate
  modified_base 14: mod_base = OTHER; note = 2'-O-methylcytidine-3'-phosphate
  modified_base 15: mod_base = OTHER; note = 2'-O-methylcytidine-3'-phosphate
  modified_base 16: mod_base = OTHER; note = 2'-O-methyladenosine-3'-phosphate
  modified_base 17: mod_base = OTHER; note = 2'-O-methylguanosine-3'-phosphate
  modified_base 18: mod_base = OTHER; note = 2'-O-methyluridine-3'-phosphate
  modified_base 19: mod_base = OTHER; note = 2'-O-methyladenosine-3'-phosphate
  modified_base 20: mod_base = OTHER; note = 2'-O-methyladenosine-3'-phosphate
  modified_base 21: mod_base = OTHER; note = 2'-O-methyluridine-3'-phosphate ((2S,4R)-1-[29-[[2-(acetylamino)-2-deoxy-beta-D-galactopyra nosyl]oxy]-14,14-bis[[3-[[3-[[5-[[2-(acetylamino)-2-deoxy-b eta-D-galactopyranosyl]oxy]-1-oxopentyl]amino]propyl]amino] -3-oxopropoxy]methyl]-1,12,19,25-tetraoxo-16-oxa-13,20,24-t riazanonacos-1-yl]-4-hydroxy-2-pyrrolidinyl)methyl ester
atgtaacttacagccagtaat

SEQ ID NO: 1857 - RNA, 21 nt, synthetic construct
  source 1..21: mol_type = other RNA
  modified_base 1: mod_base = OTHER; note = 2'-O-methylcytidine-3'-phosphorothioate
  modified_base 2: mod_base = OTHER; note = 2'-O-methyluridine-3'-phosphorothioate
  modified_base 3: mod_base = OTHER; note = 2'-O-methyluridine-3'-phosphate
  modified_base 4: mod_base = OTHER; note = 2'-O-methyladenosine-3'-phosphate
  modified_base 5: mod_base = OTHER; note = 2'-O-methylcytidine-3'-phosphate
  modified_base 6: mod_base = OTHER; note = 2'-O-methyladenosine-3'-phosphate
  modified_base 7: mod_base = OTHER; note = 2'-deoxy-2'-fluoroguanosine-3'-phosphate
  modified_base 8: mod_base = OTHER; note = 2'-O-methylcytidine-3'-phosphate
  modified_base 9: mod_base = OTHER; note = 2'-deoxy-2'-fluorocytidine-3'-phosphate
  modified_base 10: mod_base = OTHER; note = 2'-deoxy-2'-fluoroadenosine-3'-phosphate
  modified_base 11: mod_base = OTHER; note = 2'-deoxy-2'-fluoroguanosine-3'-phosphate
  modified_base 12: mod_base = OTHER; note = 2'-O-methyluridine-3'-phosphate
  modified_base 13: mod_base = OTHER; note = 2'-O-methyladenosine-3'-phosphate
  modified_base 14: mod_base = OTHER; note = 2'-O-methyladenosine-3'-phosphate
  modified_base 15: mod_base = OTHER; note = 2'-O-methyladenosine-3'-phosphate
  modified_base 16: mod_base = OTHER; note = 2'-O-methylcytidine-3'-phosphate
  modified_base 17: mod_base = OTHER; note = 2'-O-methyluridine-3'-phosphate
  modified_base 18: mod_base = OTHER; note = 2'-O-methylcytidine-3'-phosphate
  modified_base 19: mod_base = OTHER; note = 2'-O-methyluridine-3'-phosphate
  modified_base 20: mod_base = OTHER; note = 2'-O-methyluridine-3'-phosphate
  modified_base 21: mod_base = OTHER; note = 2'-O-methyluridine-3'-phosphate ((2S,4R)-1-[29-[[2-(acetylamino)-2-deoxy-beta-D-galactopyra nosyl]oxy]-14,14-bis[[3-[[3-[[5-[[2-(acetylamino)-2-deoxy-b eta-D-galactopyranosyl]oxy]-1-oxopentyl]amino]propyl]amino] -3-oxopropoxy]methyl]-1,12,19,25-tetraoxo-16-oxa-13,20,24-t riazanonacos-1-yl]-4-hydroxy-2-pyrrolidinyl)methyl ester
cttacagccagtaaactcttt

SEQ ID NO: 1858 - RNA, 21 nt, synthetic construct
  source 1..21: mol_type = other RNA
  modified_base 1: mod_base = OTHER; note = 2'-O-methylcytidine-3'-phosphorothioate
  modified_base 2: mod_base = OTHER; note = 2'-O-methylcytidine-3'-phosphorothioate
  modified_base 3: mod_base = OTHER; note = 2'-O-methyladenosine-3'-phosphate
  modified_base 4: mod_base = OTHER; note = 2'-O-methylguanosine-3'-phosphate
  modified_base 5: mod_base = OTHER; note = 2'-O-methyluridine-3'-phosphate
  modified_base 6: mod_base = OTHER; note = 2'-O-methyladenosine-3'-phosphate
  modified_base 7: mod_base = OTHER; note = 2'-deoxy-2'-fluoroadenosine-3'-phosphate
  modified_base 8: mod_base = OTHER; note = 2'-O-methyladenosine-3'-phosphate
  modified_base 9: mod_base = OTHER; note = 2'-deoxy-2'-fluorocytidine-3'-phosphate
  modified_base 10: mod_base = OTHER; note = 2'-deoxy-2'-fluorouridine-3'-phosphate
  modified_base 11: mod_base = OTHER; note = 2'-deoxy-2'-fluorocytidine-3'-phosphate
  modified_base 12: mod_base = OTHER; note = 2'-O-methyluridine-3'-phosphate
  modified_base 13: mod_base = OTHER; note = 2'-O-methyluridine-3'-phosphate
  modified_base 14: mod_base = OTHER; note = 2'-O-methyluridine-3'-phosphate
  modified_base 15: mod_base = OTHER; note = 2'-O-methyluridine-3'-phosphate
  modified_base 16: mod_base = OTHER; note = 2'-O-methylguanosine-3'-phosphate
  modified_base 17: mod_base = OTHER; note = 2'-O-methylguanosine-3'-phosphate
  modified_base 18: mod_base = OTHER; note = 2'-O-methyladenosine-3'-phosphate
  modified_base 19: mod_base = OTHER; note = 2'-O-methyluridine-3'-phosphate
  modified_base 20: mod_base = OTHER; note = 2'-O-methyluridine-3'-phosphate
  modified_base 21: mod_base = OTHER; note = 2'-O-methyluridine-3'-phosphate ((2S,4R)-1-[29-[[2-(acetylamino)-2-deoxy-beta-D-galactopyra nosyl]oxy]-14,14-bis[[3-[[3-[[5-[[2-(acetylamino)-2-deoxy-b eta-D-galactopyranosyl]oxy]-1-oxopentyl]amino]propyl]amino] -3-oxopropoxy]methyl]-1,12,19,25-tetraoxo-16-oxa-13,20,24-t riazanonacos-1-yl]-4-hydroxy-2-pyrrolidinyl)methyl ester
ccagtaaactcttttggattt

SEQ ID NO: 1859 - RNA, 21 nt, synthetic construct
  source 1..21: mol_type = other RNA
  modified_base 1: mod_base = OTHER; note = 2'-O-methyladenosine-3'-phosphorothioate
  modified_base 2: mod_base = OTHER; note = 2'-O-methylcytidine-3'-phosphorothioate
  modified_base 3: mod_base = OTHER; note = 2'-O-methyluridine-3'-phosphate
  modified_base 4: mod_base = OTHER; note = 2'-O-methylcytidine-3'-phosphate
  modified_base 5: mod_base = OTHER; note = 2'-O-methyluridine-3'-phosphate
  modified_base 6: mod_base = OTHER; note = 2'-O-methyluridine-3'-phosphate
  modified_base 7: mod_base = OTHER; note = 2'-deoxy-2'-fluorouridine-3'-phosphate
  modified_base 8: mod_base = OTHER; note = 2'-O-methyluridine-3'-phosphate
  modified_base 9: mod_base = OTHER; note = 2'-deoxy-2'-fluoroguanosine-3'-phosphate
  modified_base 10: mod_base = OTHER; note = 2'-deoxy-2'-fluoroguanosine-3'-phosphate
  modified_base 11: mod_base = OTHER; note = 2'-deoxy-2'-fluoroadenosine-3'-phosphate
  modified_base 12: mod_base = OTHER; note = 2'-O-methyluridine-3'-phosphate
  modified_base 13: mod_base = OTHER; note = 2'-O-methyluridine-3'-phosphate
  modified_base 14: mod_base = OTHER; note = 2'-O-methyluridine-3'-phosphate
  modified_base 15: mod_base = OTHER; note = 2'-O-methylguanosine-3'-phosphate
  modified_base 16: mod_base = OTHER; note = 2'-O-methylcytidine-3'-phosphate
  modified_base 17: mod_base = OTHER; note = 2'-O-methylcytidine-3'-phosphate
  modified_base 18: mod_base = OTHER; note = 2'-O-methyladenosine-3'-phosphate
  modified_base 19: mod_base = OTHER; note = 2'-O-methyladenosine-3'-phosphate
  modified_base 20: mod_base = OTHER; note = 2'-O-methyluridine-3'-phosphate
  modified_base 21: mod_base = OTHER; note = 2'-O-methyluridine-3'-phosphate ((2S,4R)-1-[29-[[2-(acetylamino)-2-deoxy-beta-D-galactopyra nosyl]oxy]-14,14-bis[[3-[[3-[[5-[[2-(acetylamino)-2-deoxy-b eta-D-galactopyranosyl]oxy]-1-oxopentyl]amino]propyl]amino] -3-oxopropoxy]methyl]-1,12,19,25-tetraoxo-16-oxa-13,20,24-t riazanonacos-1-yl]-4-hydroxy-2-pyrrolidinyl)methyl ester
actcttttggatttgccaatt

SEQ ID NO: 1860 - RNA, 21 nt, synthetic construct
  source 1..21: mol_type = other RNA
  modified_base 1: mod_base = OTHER; note = 2'-O-methylguanosine-3'-phosphorothioate
  modified_base 2: mod_base = OTHER; note = 2'-O-methyladenosine-3'-phosphorothioate
  modified_base 3: mod_base = OTHER; note = 2'-O-methyluridine-3'-phosphate
  modified_base 4: mod_base = OTHER; note = 2'-O-methyluridine-3'-phosphate
  modified_base 5: mod_base = OTHER; note = 2'-O-methyluridine-3'-phosphate
  modified_base 6: mod_base = OTHER; note = 2'-O-methylguanosine-3'-phosphate
  modified_base 7: mod_base = OTHER; note = 2'-deoxy-2'-fluorocytidine-3'-phosphate
  modified_base 8: mod_base = OTHER; note = 2'-O-methylcytidine-3'-phosphate
  modified_base 9: mod_base = OTHER; note = 2'-deoxy-2'-fluoroadenosine-3'-phosphate
  modified_base 10: mod_base = OTHER; note = 2'-deoxy-2'-fluoroadenosine-3'-phosphate
  modified_base 11: mod_base = OTHER; note = 2'-deoxy-2'-fluorouridine-3'-phosphate
  modified_base 12: mod_base = OTHER; note = 2'-O-methyluridine-3'-phosphate
  modified_base 13: mod_base = OTHER; note = 2'-O-methylcytidine-3'-phosphate
  modified_base 14: mod_base = OTHER; note = 2'-O-methyladenosine-3'-phosphate
  modified_base 15: mod_base = OTHER; note = 2'-O-methyluridine-3'-phosphate
  modified_base 16: mod_base = OTHER; note = 2'-O-methyladenosine-3'-phosphate
  modified_base 17: mod_base = OTHER; note = 2'-O-methyluridine-3'-phosphate
  modified_base 18: mod_base = OTHER; note = 2'-O-methyladenosine-3'-phosphate
  modified_base 19: mod_base = OTHER; note = 2'-O-methyluridine-3'-phosphate
  modified_base 20: mod_base = OTHER; note = 2'-O-methyluridine-3'-phosphate
  modified_base 21: mod_base = OTHER; note = 2'-O-methyluridine-3'-phosphate ((2S,4R)-1-[29-[[2-(acetylamino)-2-deoxy-beta-D-galactopyra nosyl]oxy]-14,14-bis[[3-[[3-[[5-[[2-(acetylamino)-2-deoxy-b eta-D-galactopyranosyl]oxy]-1-oxopentyl]amino]propyl]amino] -3-oxopropoxy]methyl]-1,12,19,25-tetraoxo-16-oxa-13,20,24-t riazanonacos-1-yl]-4-hydroxy-2-pyrrolidinyl)methyl ester
gatttgccaattcatatattt

SEQ ID NO: 1861 - RNA, 21 nt, synthetic construct
  source 1..21: mol_type = other RNA
  modified_base 1: mod_base = OTHER; note = 2'-O-methyladenosine-3'-phosphorothioate
  modified_base 2: mod_base = OTHER; note = 2'-O-methyluridine-3'-phosphorothioate
  modified_base 3: mod_base = OTHER; note = 2'-O-methyluridine-3'-phosphate
  modified_base 4: mod_base = OTHER; note = 2'-O-methylcytidine-3'-phosphate
  modified_base 5: mod_base = OTHER; note = 2'-O-methyladenosine-3'-phosphate
  modified_base 6: mod_base = OTHER; note = 2'-O-methyluridine-3'-phosphate
  modified_base 7: mod_base = OTHER; note = 2'-deoxy-2'-fluoroadenosine-3'-phosphate
  modified_base 8: mod_base = OTHER; note = 2'-O-methyluridine-3'-phosphate
  modified_base 9: mod_base = OTHER; note = 2'-deoxy-2'-fluoroadenosine-3'-phosphate
  modified_base 10: mod_base = OTHER; note = 2'-deoxy-2'-fluorouridine-3'-phosphate
  modified_base 11: mod_base = OTHER; note = 2'-deoxy-2'-fluorouridine-3'-phosphate
  modified_base 12: mod_base = OTHER; note = 2'-O-methylguanosine-3'-phosphate
  modified_base 13: mod_base = OTHER; note = 2'-O-methylcytidine-3'-phosphate
  modified_base 14: mod_base = OTHER; note = 2'-O-methylcytidine-3'-phosphate
  modified_base 15: mod_base = OTHER; note = 2'-O-methyladenosine-3'-phosphate
  modified_base 16: mod_base = OTHER; note = 2'-O-methyluridine-3'-phosphate
  modified_base 17: mod_base = OTHER; note = 2'-O-methylguanosine-3'-phosphate
  modified_base 18: mod_base = OTHER; note = 2'-O-methylcytidine-3'-phosphate
  modified_base 19: mod_base = OTHER; note = 2'-O-methyladenosine-3'-phosphate
  modified_base 20: mod_base = OTHER; note = 2'-O-methyluridine-3'-phosphate
  modified_base 21: mod_base = OTHER; note = 2'-O-methyluridine-3'-phosphate ((2S,4R)-1-[29-[[2-(acetylamino)-2-deoxy-beta-D-galactopyra nosyl]oxy]-14,14-bis[[3-[[3-[[5-[[2-(acetylamino)-2-deoxy-b eta-D-galactopyranosyl]oxy]-1-oxopentyl]amino]propyl]amino] -3-oxopropoxy]methyl]-1,12,19,25-tetraoxo-16-oxa-13,20,24-t riazanonacos-1-yl]-4-hydroxy-2-pyrrolidinyl)methyl ester
attcatatattgccatgcatt

SEQ ID NO: 1862 - RNA, 21 nt, synthetic construct
  source 1..21: mol_type = other RNA
  modified_base 1: mod_base = OTHER; note = 2'-O-methyladenosine-3'-phosphorothioate
  modified_base 2: mod_base = OTHER; note = 2'-O-methyluridine-3'-phosphorothioate
  modified_base 3: mod_base = OTHER; note = 2'-O-methyladenosine-3'-phosphate
  modified_base 4: mod_base = OTHER; note = 2'-O-methyluridine-3'-phosphate
  modified_base 5: mod_base = OTHER; note = 2'-O-methyluridine-3'-phosphate
  modified_base 6: mod_base = OTHER; note = 2'-O-methylguanosine-3'-phosphate
  modified_base 7: mod_base = OTHER; note = 2'-deoxy-2'-fluorocytidine-3'-phosphate
  modified_base 8: mod_base = OTHER; note = 2'-O-methylcytidine-3'-phosphate
  modified_base 9: mod_base = OTHER; note = 2'-deoxy-2'-fluoroadenosine-3'-phosphate
  modified_base 10: mod_base = OTHER; note = 2'-deoxy-2'-fluorouridine-3'-phosphate
  modified_base 11: mod_base = OTHER; note = 2'-deoxy-2'-fluoroguanosine-3'-phosphate
  modified_base 12: mod_base = OTHER; note = 2'-O-methylcytidine-3'-phosphate
  modified_base 13: mod_base = OTHER; note = 2'-O-methyladenosine-3'-phosphate
  modified_base 14: mod_base = OTHER; note = 2'-O-methyluridine-3'-phosphate
  modified_base 15: mod_base = OTHER; note = 2'-O-methyluridine-3'-phosphate
  modified_base 16: mod_base = OTHER; note = 2'-O-methyladenosine-3'-phosphate
  modified_base 17: mod_base = OTHER; note = 2'-O-methyluridine-3'-phosphate
  modified_base 18: mod_base = OTHER; note = 2'-O-methylcytidine-3'-phosphate
  modified_base 19: mod_base = OTHER; note = 2'-O-methyladenosine-3'-phosphate
  modified_base 20: mod_base = OTHER; note = 2'-O-methylcytidine-3'-phosphate
  modified_base 21: mod_base = OTHER; note = 2'-O-methyluridine-3'-phosphate ((2S,4R)-1-[29-[[2-(acetylamino)-2-deoxy-beta-D-galactopyra nosyl]oxy]-14,14-bis[[3-[[3-[[5-[[2-(acetylamino)-2-deoxy-b eta-D-galactopyranosyl]oxy]-1-oxopentyl]amino]propyl]amino] -3-oxopropoxy]methyl]-1,12,19,25-tetraoxo-16-oxa-13,20,24-t riazanonacos-1-yl]-4-hydroxy-2-pyrrolidinyl)methyl ester
atattgccatgcattatcact

SEQ ID NO: 1863 - RNA, 21 nt, synthetic construct
  source 1..21: mol_type = other RNA
  modified_base 1: mod_base = OTHER; note = 2'-O-methyladenosine-3'-phosphorothioate
  modified_base 2: mod_base = OTHER; note = 2'-O-methyluridine-3'-phosphorothioate
  modified_base 3: mod_base = OTHER; note = 2'-O-methylguanosine-3'-phosphate
  modified_base 4: mod_base = OTHER; note = 2'-O-methylcytidine-3'-phosphate
  modified_base 5: mod_base = OTHER; note = 2'-O-methyladenosine-3'-phosphate
  modified_base 6: mod_base = OTHER; note = 2'-O-methyluridine-3'-phosphate
  modified_base 7: mod_base = OTHER; note = 2'-deoxy-2'-fluorouridine-3'-phosphate
  modified_base 8: mod_base = OTHER; note = 2'-O-methyladenosine-3'-phosphate
  modified_base 9: mod_base = OTHER; note = 2'-deoxy-2'-fluorouridine-3'-phosphate
  modified_base 10: mod_base = OTHER; note = 2'-deoxy-2'-fluorocytidine-3'-phosphate
  modified_base 11: mod_base = OTHER; note = 2'-deoxy-2'-fluoroadenosine-3'-phosphate
  modified_base 12: mod_base = OTHER; note = 2'-O-methylcytidine-3'-phosphate
  modified_base 13: mod_base = OTHER; note = 2'-O-methyladenosine-3'-phosphate
  modified_base 14: mod_base = OTHER; note = 2'-O-methylcytidine-3'-phosphate
  modified_base 15: mod_base = OTHER; note = 2'-O-methylcytidine-3'-phosphate
  modified_base 16: mod_base = OTHER; note = 2'-O-methyladenosine-3'-phosphate
  modified_base 17: mod_base = OTHER; note = 2'-O-methylcytidine-3'-phosphate
  modified_base 18: mod_base = OTHER; note = 2'-O-methyluridine-3'-phosphate
  modified_base 19: mod_base = OTHER; note = 2'-O-methyladenosine-3'-phosphate
  modified_base 20: mod_base = OTHER; note = 2'-O-methyladenosine-3'-phosphate
  modified_base 21: mod_base = OTHER; note = 2'-O-methyluridine-3'-phosphate ((2S,4R)-1-[29-[[2-(acetylamino)-2-deoxy-beta-D-galactopyra nosyl]oxy]-14,14-bis[[3-[[3-[[5-[[2-(acetylamino)-2-deoxy-b eta-D-galactopyranosyl]oxy]-1-oxopentyl]amino]propyl]amino] -3-oxopropoxy]methyl]-1,12,19,25-tetraoxo-16-oxa-13,20,24-t riazanonacos-1-yl]-4-hydroxy-2-pyrrolidinyl)methyl ester
atgcattatcacaccactaat

SEQ ID NO: 1864 - RNA, 21 nt, synthetic construct
  source 1..21: mol_type = other RNA
  modified_base 1: mod_base = OTHER; note = 2'-O-methyluridine-3'-phosphorothioate
  modified_base 2: mod_base = OTHER; note = 2'-O-methyladenosine-3'-phosphorothioate
  modified_base 3: mod_base = OTHER; note = 2'-O-methyluridine-3'-phosphate
  modified_base 4: mod_base = OTHER; note = 2'-O-methylcytidine-3'-phosphate
  modified_base 5: mod_base = OTHER; note = 2'-O-methyladenosine-3'-phosphate
  modified_base 6: mod_base = OTHER; note = 2'-O-methylcytidine-3'-phosphate
  modified_base 7: mod_base = OTHER; note = 2'-deoxy-2'-fluoroadenosine-3'-phosphate
  modified_base 8: mod_base = OTHER; note = 2'-O-methylcytidine-3'-phosphate
  modified_base 9: mod_base = OTHER; note = 2'-deoxy-2'-fluorocytidine-3'-phosphate
  modified_base 10: mod_base = OTHER; note = 2'-deoxy-2'-fluoroadenosine-3'-phosphate
  modified_base 11: mod_base = OTHER; note = 2'-deoxy-2'-fluorocytidine-3'-phosphate
  modified_base 12: mod_base = OTHER; note = 2'-O-methyluridine-3'-phosphate
  modified_base 13: mod_base = OTHER; note = 2'-O-methyladenosine-3'-phosphate
  modified_base 14: mod_base = OTHER; note = 2'-O-methyladenosine-3'-phosphate
  modified_base 15: mod_base = OTHER; note = 2'-O-methyluridine-3'-phosphate
  modified_base 16: mod_base = OTHER; note = 2'-O-methylguanosine-3'-phosphate
  modified_base 17: mod_base = OTHER; note = 2'-O-methyladenosine-3'-phosphate
  modified_base 18: mod_base = OTHER; note = 2'-O-methylcytidine-3'-phosphate
  modified_base 19: mod_base = OTHER; note = 2'-O-methyluridine-3'-phosphate
  modified_base 20: mod_base = OTHER; note = 2'-O-methyluridine-3'-phosphate
  modified_base 21: mod_base = OTHER; note = 2'-O-methyluridine-3'-phosphate ((2S,4R)-1-[29-[[2-(acetylamino)-2-deoxy-beta-D-galactopyra nosyl]oxy]-14,14-bis[[3-[[3-[[5-[[2-(acetylamino)-2-deoxy-b eta-D-galactopyranosyl]oxy]-1-oxopentyl]amino]propyl]amino] -3-oxopropoxy]methyl]-1,12,19,25-tetraoxo-16-oxa-13,20,24-t riazanonacos-1-yl]-4-hydroxy-2-pyrrolidinyl)methyl ester
tatcacaccactaatgacttt

SEQ ID NO: 1865 - RNA, 21 nt, synthetic construct
  source 1..21: mol_type = other RNA
  modified_base 1: mod_base = OTHER; note = 2'-O-methylcytidine-3'-phosphorothioate
  modified_base 2: mod_base = OTHER; note = 2'-O-methyladenosine-3'-phosphorothioate
  modified_base 3: mod_base = OTHER; note = 2'-O-methylcytidine-3'-phosphate
  modified_base 4: mod_base = OTHER; note = 2'-O-methylcytidine-3'-phosphate
  modified_base 5: mod_base = OTHER; note = 2'-O-methyladenosine-3'-phosphate
  modified_base 6: mod_base = OTHER; note = 2'-O-methylcytidine-3'-phosphate
  modified_base 7: mod_base = OTHER; note = 2'-deoxy-2'-fluorouridine-3'-phosphate
  modified_base 8: mod_base = OTHER; note = 2'-O-methyladenosine-3'-phosphate
  modified_base 9: mod_base = OTHER; note = 2'-deoxy-2'-fluoroadenosine-3'-phosphate
  modified_base 10: mod_base = OTHER; note = 2'-deoxy-2'-fluorouridine-3'-phosphate
  modified_base 11: mod_base = OTHER; note = 2'-deoxy-2'-fluoroguanosine-3'-phosphate
  modified_base 12: mod_base = OTHER; note = 2'-O-methyladenosine-3'-phosphate
  modified_base 13: mod_base = OTHER; note = 2'-O-methylcytidine-3'-phosphate
  modified_base 14: mod_base = OTHER; note = 2'-O-methyluridine-3'-phosphate
  modified_base 15: mod_base = OTHER; note = 2'-O-methyluridine-3'-phosphate
  modified_base 16: mod_base = OTHER; note = 2'-O-methyladenosine-3'-phosphate
  modified_base 17: mod_base = OTHER; note = 2'-O-methylguanosine-3'-phosphate
  modified_base 18: mod_base = OTHER; note = 2'-O-methyluridine-3'-phosphate
  modified_base 19: mod_base = OTHER; note = 2'-O-methylguanosine-3'-phosphate
  modified_base 20: mod_base = OTHER; note = 2'-O-methylcytidine-3'-phosphate
  modified_base 21: mod_base = OTHER; note = 2'-O-methyluridine-3'-phosphate ((2S,4R)-1-[29-[[2-(acetylamino)-2-deoxy-beta-D-galactopyra nosyl]oxy]-14,14-bis[[3-[[3-[[5-[[2-(acetylamino)-2-deoxy-b eta-D-galactopyranosyl]oxy]-1-oxopentyl]amino]propyl]amino] -3-oxopropoxy]methyl]-1,12,19,25-tetraoxo-16-oxa-13,20,24-t riazanonacos-1-yl]-4-hydroxy-2-pyrrolidinyl)methyl ester
caccactaatgacttagtgct

SEQ ID NO: 1866 - RNA, 21 nt, synthetic construct
  source 1..21: mol_type = other RNA
  modified_base 1: mod_base = OTHER; note = 2'-O-methyladenosine-3'-phosphorothioate
  modified_base 2: mod_base = OTHER; note = 2'-O-methyladenosine-3'-phosphorothioate
  modified_base 3: mod_base = OTHER; note = 2'-O-methyluridine-3'-phosphate
  modified_base 4: mod_base = OTHER; note = 2'-O-methylguanosine-3'-phosphate
  modified_base 5: mod_base = OTHER; note = 2'-O-methyladenosine-3'-phosphate
  modified_base 6: mod_base = OTHER; note = 2'-O-methylcytidine-3'-phosphate
  modified_base 7: mod_base = OTHER; note = 2'-deoxy-2'-fluorouridine-3'-phosphate
  modified_base 8: mod_base = OTHER; note = 2'-O-methyluridine-3'-phosphate
  modified_base 9: mod_base = OTHER; note = 2'-deoxy-2'-fluoroadenosine-3'-phosphate
  modified_base 10: mod_base = OTHER; note = 2'-deoxy-2'-fluoroguanosine-3'-phosphate
  modified_base 11: mod_base = OTHER; note = 2'-deoxy-2'-fluorouridine-3'-phosphate
  modified_base 12: mod_base = OTHER; note = 2'-O-methylguanosine-3'-phosphate
  modified_base 13: mod_base = OTHER; note = 2'-O-methylcytidine-3'-phosphate
  modified_base 14: mod_base = OTHER; note = 2'-O-methyladenosine-3'-phosphate
  modified_base 15: mod_base = OTHER; note = 2'-O-methylguanosine-3'-phosphate
  modified_base 16: mod_base = OTHER; note = 2'-O-methylguanosine-3'-phosphate
  modified_base 17: mod_base = OTHER; note = 2'-O-methyladenosine-3'-phosphate
  modified_base 18: mod_base = OTHER; note = 2'-O-methyladenosine-3'-phosphate
  modified_base 19: mod_base = OTHER; note = 2'-O-methyluridine-3'-phosphate
  modified_base 20: mod_base = OTHER; note = 2'-O-methyladenosine-3'-phosphate
  modified_base 21: mod_base = OTHER; note = 2'-O-methyluridine-3'-phosphate ((2S,4R)-1-[29-[[2-(acetylamino)-2-deoxy-beta-D-galactopyra nosyl]oxy]-14,14-bis[[3-[[3-[[5-[[2-(acetylamino)-2-deoxy-b eta-D-galactopyranosyl]oxy]-1-oxopentyl]amino]propyl]amino] -3-oxopropoxy]methyl]-1,12,19,25-tetraoxo-16-oxa-13,20,24-t riazanonacos-1-yl]-4-hydroxy-2-pyrrolidinyl)methyl ester
aatgacttagtgcaggaatat

SEQ ID NO: 1867 - RNA, 21 nt, synthetic construct
  source 1..21: mol_type = other RNA
  modified_base 1: mod_base = OTHER; note = 2'-O-methyluridine-3'-phosphorothioate
  modified_base 2: mod_base = OTHER; note = 2'-O-methyluridine-3'-phosphorothioate
  modified_base 3: mod_base = OTHER; note = 2'-O-methyladenosine-3'-phosphate
  modified_base 4: mod_base = OTHER; note = 2'-O-methylguanosine-3'-phosphate
  modified_base 5: mod_base = OTHER; note = 2'-O-methyluridine-3'-phosphate
  modified_base 6: mod_base = OTHER; note = 2'-O-methylguanosine-3'-phosphate
  modified_base 7: mod_base = OTHER; note = 2'-deoxy-2'-fluorocytidine-3'-phosphate
  modified_base 8: mod_base = OTHER; note = 2'-O-methyladenosine-3'-phosphate
  modified_base 9: mod_base = OTHER; note = 2'-deoxy-2'-fluoroguanosine-3'-phosphate
  modified_base 10: mod_base = OTHER; note = 2'-deoxy-2'-fluoroguanosine-3'-phosphate
  modified_base 11: mod_base = OTHER; note = 2'-deoxy-2'-fluoroadenosine-3'-phosphate
  modified_base 12: mod_base = OTHER; note = 2'-O-methyladenosine-3'-phosphate
  modified_base 13: mod_base = OTHER; note = 2'-O-methyluridine-3'-phosphate
  modified_base 14: mod_base = OTHER; note = 2'-O-methyladenosine-3'-phosphate
  modified_base 15: mod_base = OTHER; note = 2'-O-methyluridine-3'-phosphate
  modified_base 16: mod_base = OTHER; note = 2'-O-methylguanosine-3'-phosphate
  modified_base 17: mod_base = OTHER; note = 2'-O-methyladenosine-3'-phosphate
  modified_base 18: mod_base = OTHER; note = 2'-O-methylcytidine-3'-phosphate
  modified_base 19: mod_base = OTHER; note = 2'-O-methyladenosine-3'-phosphate
  modified_base 20: mod_base = OTHER; note = 2'-O-methylguanosine-3'-phosphate
  modified_base 21: mod_base = OTHER; note = 2'-O-methyluridine-3'-phosphate ((2S,4R)-1-[29-[[2-(acetylamino)-2-deoxy-beta-D-galactopyra nosyl]oxy]-14,14-bis[[3-[[3-[[5-[[2-(acetylamino)-2-deoxy-b eta-D-galactopyranosyl]oxy]-1-oxopentyl]amino]propyl]amino] -3-oxopropoxy]methyl]-1,12,19,25-tetraoxo-16-oxa-13,20,24-t riazanonacos-1-yl]-4-hydroxy-2-pyrrolidinyl)methyl ester
ttagtgcaggaatatgacagt

SEQ ID NO: 1868 - RNA, 21 nt, synthetic construct
  source 1..21: mol_type = other RNA
  modified_base 1: mod_base = OTHER; note = 2'-O-methylguanosine-3'-phosphorothioate
  modified_base 2: mod_base = OTHER; note = 2'-O-methylcytidine-3'-phosphorothioate
  modified_base 3: mod_base = OTHER; note = 2'-O-methyladenosine-3'-phosphate
  modified_base 4: mod_base = OTHER; note = 2'-O-methylguanosine-3'-phosphate
  modified_base 5: mod_base = OTHER; note = 2'-O-methylguanosine-3'-phosphate
  modified_base 6: mod_base = OTHER; note = 2'-O-methyladenosine-3'-phosphate
  modified_base 7: mod_base = OTHER; note = 2'-deoxy-2'-fluoroadenosine-3'-phosphate
  modified_base 8: mod_base = OTHER; note = 2'-O-methyluridine-3'-phosphate
  modified_base 9: mod_base = OTHER; note = 2'-deoxy-2'-fluoroadenosine-3'-phosphate
  modified_base 10: mod_base = OTHER; note = 2'-deoxy-2'-fluorouridine-3'-phosphate
  modified_base 11: mod_base = OTHER; note = 2'-deoxy-2'-fluoroguanosine-3'-phosphate
  modified_base 12: mod_base = OTHER; note = 2'-O-methyladenosine-3'-phosphate
  modified_base 13: mod_base = OTHER; note = 2'-O-methylcytidine-3'-phosphate
  modified_base 14: mod_base = OTHER; note = 2'-O-methyladenosine-3'-phosphate
  modified_base 15: mod_base = OTHER; note = 2'-O-methylguanosine-3'-phosphate
  modified_base 16: mod_base = OTHER; note = 2'-O-methylcytidine-3'-phosphate
  modified_base 17: mod_base = OTHER; note = 2'-O-methyladenosine-3'-phosphate
  modified_base 18: mod_base = OTHER; note = 2'-O-methylcytidine-3'-phosphate
  modified_base 19: mod_base = OTHER; note = 2'-O-methyluridine-3'-phosphate
  modified_base 20: mod_base = OTHER; note = 2'-O-methyluridine-3'-phosphate
  modified_base 21: mod_base = OTHER; note = 2'-O-methyluridine-3'-phosphate ((2S,4R)-1-[29-[[2-(acetylamino)-2-deoxy-beta-D-galactopyra nosyl]oxy]-14,14-bis[[3-[[3-[[5-[[2-(acetylamino)-2-deoxy-b eta-D-galactopyranosyl]oxy]-1-oxopentyl]amino]propyl]amino] -3-oxopropoxy]methyl]-1,12,19,25-tetraoxo-16-oxa-13,20,24-t riazanonacos-1-yl]-4-hydroxy-2-pyrrolidinyl)methyl ester
gcaggaatatgacagcacttt

SEQ ID NO: 1869 - RNA, 21 nt, synthetic construct
  source 1..21: mol_type = other RNA
  modified_base 1: mod_base = OTHER; note = 2'-O-methyluridine-3'-phosphorothioate
  modified_base 2: mod_base = OTHER; note = 2'-O-methyladenosine-3'-phosphorothioate
  modified_base 3: mod_base = OTHER; note = 2'-O-methyluridine-3'-phosphate
  modified_base 4: mod_base = OTHER; note = 2'-O-methylguanosine-3'-phosphate
  modified_base 5: mod_base = OTHER; note = 2'-O-methyladenosine-3'-phosphate
  modified_base 6: mod_base = OTHER; note = 2'-O-methylcytidine-3'-phosphate
  modified_base 7: mod_base = OTHER; note = 2'-deoxy-2'-fluoroadenosine-3'-phosphate
  modified_base 8: mod_base = OTHER; note = 2'-O-methylguanosine-3'-phosphate
  modified_base 9: mod_base = OTHER; note = 2'-deoxy-2'-fluorocytidine-3'-phosphate
  modified_base 10: mod_base = OTHER; note = 2'-deoxy-2'-fluoroadenosine-3'-phosphate
  modified_base 11: mod_base = OTHER; note = 2'-deoxy-2'-fluorocytidine-3'-phosphate
  modified_base 12: mod_base = OTHER; note = 2'-O-methyluridine-3'-phosphate
  modified_base 13: mod_base = OTHER; note = 2'-O-methyluridine-3'-phosphate
  modified_base 14: mod_base = OTHER; note = 2'-O-methylcytidine-3'-phosphate
  modified_base 15: mod_base = OTHER; note = 2'-O-methyladenosine-3'-phosphate
  modified_base 16: mod_base = OTHER; note = 2'-O-methylguanosine-3'-phosphate
  modified_base 17: mod_base = OTHER; note = 2'-O-methylcytidine-3'-phosphate
  modified_base 18: mod_base = OTHER; note = 2'-O-methylcytidine-3'-phosphate
  modified_base 19: mod_base = OTHER; note = 2'-O-methyladenosine-3'-phosphate
  modified_base 20: mod_base = OTHER; note = 2'-O-methyladenosine-3'-phosphate
  modified_base 21: mod_base = OTHER; note = 2'-O-methyluridine-3'-phosphate ((2S,4R)-1-[29-[[2-(acetylamino)-2-deoxy-beta-D-galactopyra nosyl]oxy]-14,14-bis[[3-[[3-[[5-[[2-(acetylamino)-2-deoxy-b eta-D-galactopyranosyl]oxy]-1-oxopentyl]amino]propyl]amino] -3-oxopropoxy]methyl]-1,12,19,25-tetraoxo-16-oxa-13,20,24-t riazanonacos-1-yl]-4-hydroxy-2-pyrrolidinyl)methyl ester
tatgacagcacttcagccaat

SEQ ID NO: 1870 - RNA, 21 nt, synthetic construct
  source 1..21: mol_type = other RNA
  modified_base 1: mod_base = OTHER; note = 2'-O-methylcytidine-3'-phosphorothioate
  modified_base 2: mod_base = OTHER; note = 2'-O-methyladenosine-3'-phosphorothioate
  modified_base 3: mod_base = OTHER; note = 2'-O-methylcytidine-3'-phosphate
  modified_base 4: mod_base = OTHER; note = 2'-O-methyluridine-3'-phosphate
  modified_base 5: mod_base = OTHER; note = 2'-O-methyluridine-3'-phosphate
  modified_base 6: mod_base = OTHER; note = 2'-O-methylcytidine-3'-phosphate
  modified_base 7: mod_base = OTHER; note = 2'-deoxy-2'-fluoroadenosine-3'-phosphate
  modified_base 8: mod_base = OTHER; note = 2'-O-methylguanosine-3'-phosphate
  modified_base 9: mod_base = OTHER; note = 2'-deoxy-2'-fluorocytidine-3'-phosphate
  modified_base 10: mod_base = OTHER; note = 2'-deoxy-2'-fluorocytidine-3'-phosphate
  modified_base 11: mod_base = OTHER; note = 2'-deoxy-2'-fluoroadenosine-3'-phosphate
  modified_base 12: mod_base = OTHER; note = 2'-O-methyladenosine-3'-phosphate
  modified_base 13: mod_base = OTHER; note = 2'-O-methylguanosine-3'-phosphate
  modified_base 14: mod_base = OTHER; note = 2'-O-methylcytidine-3'-phosphate
  modified_base 15: mod_base = OTHER; note = 2'-O-methyladenosine-3'-phosphate
  modified_base 16: mod_base = OTHER; note = 2'-O-methylguanosine-3'-phosphate
  modified_base 17: mod_base = OTHER; note = 2'-O-methyladenosine-3'-phosphate
  modified_base 18: mod_base = OTHER; note = 2'-O-methyluridine-3'-phosphate
  modified_base 19: mod_base = OTHER; note = 2'-O-methyluridine-3'-phosphate
  modified_base 20: mod_base = OTHER; note = 2'-O-methylcytidine-3'-phosphate
  modified_base 21: mod_base = OTHER; note = 2'-O-methyluridine-3'-phosphate ((2S,4R)-1-[29-[[2-(acetylamino)-2-deoxy-beta-D-galactopyra nosyl]oxy]-14,14-bis[[3-[[3-[[5-[[2-(acetylamino)-2-deoxy-b eta-D-galactopyranosyl]oxy]-1-oxopentyl]amino]propyl]amino] -3-oxopropoxy]methyl]-1,12,19,25-tetraoxo-16-oxa-13,20,24-t riazanonacos-1-yl]-4-hydroxy-2-pyrrolidinyl)methyl ester
cacttcagccaagcagattct

SEQ ID NO: 1871 - RNA, 21 nt, synthetic construct
  source 1..21: mol_type = other RNA
  modified_base 1: mod_base = OTHER; note = 2'-O-methylcytidine-3'-phosphorothioate
  modified_base 2: mod_base = OTHER; note = 2'-O-methyladenosine-3'-phosphorothioate
  modified_base 3: mod_base = OTHER; note = 2'-O-methylguanosine-3'-phosphate
  modified_base 4: mod_base = OTHER; note = 2'-O-methylcytidine-3'-phosphate
  modified_base 5: mod_base = OTHER; note = 2'-O-methylcytidine-3'-phosphate
  modified_base 6: mod_base = OTHER; note = 2'-O-methyladenosine-3'-phosphate
  modified_base 7: mod_base = OTHER; note = 2'-deoxy-2'-fluoroadenosine-3'-phosphate
  modified_base 8: mod_base = OTHER; note = 2'-O-methylguanosine-3'-phosphate
  modified_base 9: mod_base = OTHER; note = 2'-deoxy-2'-fluorocytidine-3'-phosphate
  modified_base 10: mod_base = OTHER; note = 2'-deoxy-2'-fluoroadenosine-3'-phosphate
  modified_base 11: mod_base = OTHER; note = 2'-deoxy-2'-fluoroguanosine-3'-phosphate
  modified_base 12: mod_base = OTHER; note = 2'-O-methyladenosine-3'-phosphate
  modified_base 13: mod_base = OTHER; note = 2'-O-methyluridine-3'-phosphate
  modified_base 14: mod_base = OTHER; note = 2'-O-methyluridine-3'-phosphate
  modified_base 15: mod_base = OTHER; note = 2'-O-methylcytidine-3'-phosphate
  modified_base 16: mod_base = OTHER; note = 2'-O-methylcytidine-3'-phosphate
  modified_base 17: mod_base = OTHER; note = 2'-O-methyladenosine-3'-phosphate
  modified_base 18: mod_base = OTHER; note = 2'-O-methylguanosine-3'-phosphate
  modified_base 19: mod_base = OTHER; note = 2'-O-methyluridine-3'-phosphate
  modified_base 20: mod_base = OTHER; note = 2'-O-methylcytidine-3'-phosphate
  modified_base 21: mod_base = OTHER; note = 2'-O-methyluridine-3'-phosphate ((2S,4R)-1-[29-[[2-(acetylamino)-2-deoxy-beta-D-galactopyra nosyl]oxy]-14,14-bis[[3-[[3-[[5-[[2-(acetylamino)-2-deoxy-b eta-D-galactopyranosyl]oxy]-1-oxopentyl]amino]propyl]amino] -3-oxopropoxy]methyl]-1,12,19,25-tetraoxo-16-oxa-13,20,24-t riazanonacos-1-yl]-4-hydroxy-2-pyrrolidinyl)methyl ester
cagccaagcagattccagtct

SEQ ID NO: 1872 - RNA, 21 nt, synthetic construct
  source 1..21: mol_type = other RNA
  modified_base 1: mod_base = OTHER; note = 2'-O-methylcytidine-3'-phosphorothioate
  modified_base 2: mod_base = OTHER; note = 2'-O-methyluridine-3'-phosphorothioate
  modified_base 3: mod_base = OTHER; note = 2'-O-methylcytidine-3'-phosphate
  modified_base 4: mod_base = OTHER; note = 2'-O-methylcytidine-3'-phosphate
  modified_base 5: mod_base = OTHER; note = 2'-O-methylguanosine-3'-phosphate
  modified_base 6: mod_base = OTHER; note = 2'-O-methyluridine-3'-phosphate
  modified_base 7: mod_base = OTHER; note = 2'-deoxy-2'-fluorouridine-3'-phosphate
  modified_base 8: mod_base = OTHER; note = 2'-O-methyluridine-3'-phosphate
  modified_base 9: mod_base = OTHER; note = 2'-deoxy-2'-fluoroadenosine-3'-phosphate
  modified_base 10: mod_base = OTHER; note = 2'-deoxy-2'-fluoroadenosine-3'-phosphate
  modified_base 11: mod_base = OTHER; note = 2'-deoxy-2'-fluoroadenosine-3'-phosphate
  modified_base 12: mod_base = OTHER; note = 2'-O-methylguanosine-3'-phosphate
  modified_base 13: mod_base = OTHER; note = 2'-O-methyluridine-3'-phosphate
  modified_base 14: mod_base = OTHER; note = 2'-O-methylcytidine-3'-phosphate
  modified_base 15: mod_base = OTHER; note = 2'-O-methyladenosine-3'-phosphate
  modified_base 16: mod_base = OTHER; note = 2'-O-methyluridine-3'-phosphate
  modified_base 17: mod_base = OTHER; note = 2'-O-methylguanosine-3'-phosphate
  modified_base 18: mod_base = OTHER; note = 2'-O-methylguanosine-3'-phosphate
  modified_base 19: mod_base = OTHER; note = 2'-O-methyladenosine-3'-phosphate
  modified_base 20: mod_base = OTHER; note = 2'-O-methylguanosine-3'-phosphate
  modified_base 21: mod_base = OTHER; note = 2'-O-methyluridine-3'-phosphate ((2S,4R)-1-[29-[[2-(acetylamino)-2-deoxy-beta-D-galactopyra nosyl]oxy]-14,14-bis[[3-[[3-[[5-[[2-(acetylamino)-2-deoxy-b eta-D-galactopyranosyl]oxy]-1-oxopentyl]amino]propyl]amino] -3-oxopropoxy]methyl]-1,12,19,25-tetraoxo-16-oxa-13,20,24-t riazanonacos-1-yl]-4-hydroxy-2-pyrrolidinyl)methyl ester
ctccgtttaaagtcatggagt

SEQ ID NO: 1873 - RNA, 21 nt, synthetic construct
  source 1..21: mol_type = other RNA
  modified_base 1: mod_base = OTHER; note = 2'-O-methyladenosine-3'-phosphorothioate
  modified_base 2: mod_base = OTHER; note = 2'-O-methyladenosine-3'-phosphorothioate
  modified_base 3: mod_base = OTHER; note = 2'-O-methyladenosine-3'-phosphate
  modified_base 4: mod_base = OTHER; note = 2'-O-methylguanosine-3'-phosphate
  modified_base 5: mod_base = OTHER; note = 2'-O-methyluridine-3'-phosphate
  modified_base 6: mod_base = OTHER; note = 2'-O-methylcytidine-3'-phosphate
  modified_base 7: mod_base = OTHER; note = 2'-deoxy-2'-fluoroadenosine-3'-phosphate
  modified_base 8: mod_base = OTHER; note = 2'-O-methyluridine-3'-phosphate
  modified_base 9: mod_base = OTHER; note = 2'-deoxy-2'-fluoroguanosine-3'-phosphate
  modified_base 10: mod_base = OTHER; note = 2'-deoxy-2'-fluoroguanosine-3'-phosphate
  modified_base 11: mod_base = OTHER; note = 2'-deoxy-2'-fluoroadenosine-3'-phosphate
  modified_base 12: mod_base = OTHER; note = 2'-O-methylguanosine-3'-phosphate
  modified_base 13: mod_base = OTHER; note = 2'-O-methylguanosine-3'-phosphate
  modified_base 14: mod_base = OTHER; note = 2'-O-methylcytidine-3'-phosphate
  modified_base 15: mod_base = OTHER; note = 2'-O-methyluridine-3'-phosphate
  modified_base 16: mod_base = OTHER; note = 2'-O-methyladenosine-3'-phosphate
  modified_base 17: mod_base = OTHER; note = 2'-O-methyluridine-3'-phosphate
  modified_base 18: mod_base = OTHER; note = 2'-O-methyladenosine-3'-phosphate
  modified_base 19: mod_base = OTHER; note = 2'-O-methylguanosine-3'-phosphate
  modified_base 20: mod_base = OTHER; note = 2'-O-methylguanosine-3'-phosphate
  modified_base 21: mod_base = OTHER; note = 2'-O-methyluridine-3'-phosphate ((2S,4R)-1-[29-[[2-(acetylamino)-2-deoxy-beta-D-galactopyra nosyl]oxy]-14,14-bis[[3-[[3-[[5-[[2-(acetylamino)-2-deoxy-b eta-D-galactopyranosyl]oxy]-1-oxopentyl]amino]propyl]amino] -3-oxopropoxy]methyl]-1,12,19,25-tetraoxo-16-oxa-13,20,24-t riazanonacos-1-yl]-4-hydroxy-2-pyrrolidinyl)methyl ester
aaagtcatggaggctataggt

SEQ ID NO: 1874 - RNA, 21 nt, synthetic construct
  source 1..21: mol_type = other RNA
  modified_base 1: mod_base = OTHER; note = 2'-O-methylguanosine-3'-phosphorothioate
  modified_base 2: mod_base = OTHER; note = 2'-O-methylguanosine-3'-phosphorothioate
  modified_base 3: mod_base = OTHER; note = 2'-O-methyladenosine-3'-phosphate
  modified_base 4: mod_base = OTHER; note = 2'-O-methylguanosine-3'-phosphate
  modified_base 5: mod_base = OTHER; note = 2'-O-methylguanosine-3'-phosphate
  modified_base 6: mod_base = OTHER; note = 2'-O-methylcytidine-3'-phosphate
  modified_base 7: mod_base = OTHER; note = 2'-deoxy-2'-fluorouridine-3'-phosphate
  modified_base 8: mod_base = OTHER; note = 2'-O-methyladenosine-3'-phosphate
  modified_base 9: mod_base = OTHER; note = 2'-deoxy-2'-fluorouridine-3'-phosphate
  modified_base 10: mod_base = OTHER; note = 2'-deoxy-2'-fluoroadenosine-3'-phosphate
  modified_base 11: mod_base = OTHER; note = 2'-deoxy-2'-fluoroguanosine-3'-phosphate
  modified_base 12: mod_base = OTHER; note = 2'-O-methylguanosine-3'-phosphate
  modified_base 13: mod_base = OTHER; note = 2'-O-methyladenosine-3'-phosphate
  modified_base 14: mod_base = OTHER; note = 2'-O-methyluridine-3'-phosphate
  modified_base 15: mod_base = OTHER; note = 2'-O-methylcytidine-3'-phosphate
  modified_base 16: mod_base = OTHER; note = 2'-O-methyluridine-3'-phosphate
  modified_base 17: mod_base = OTHER; note = 2'-O-methyluridine-3'-phosphate
  modified_base 18: mod_base = OTHER; note = 2'-O-methyladenosine-3'-phosphate
  modified_base 19: mod_base = OTHER; note = 2'-O-methyluridine-3'-phosphate
  modified_base 20: mod_base = OTHER; note = 2'-O-methylguanosine-3'-phosphate
  modified_base 21: mod_base = OTHER; note = 2'-O-methyluridine-3'-phosphate ((2S,4R)-1-[29-[[2-(acetylamino)-2-deoxy-beta-D-galactopyra nosyl]oxy]-14,14-bis[[3-[[3-[[5-[[2-(acetylamino)-2-deoxy-b eta-D-galactopyranosyl]oxy]-1-oxopentyl]amino]propyl]amino] -3-oxopropoxy]methyl]-1,12,19,25-tetraoxo-16-oxa-13,20,24-t riazanonacos-1-yl]-4-hydroxy-2-pyrrolidinyl)methyl ester
ggaggctataggatcttatgt

SEQ ID NO: 1875 - RNA, 21 nt, synthetic construct
  source 1..21: mol_type = other RNA
  modified_base 1: mod_base = OTHER; note = 2'-O-methylcytidine-3'-phosphorothioate
  modified_base 2: mod_base = OTHER; note = 2'-O-methyluridine-3'-phosphorothioate
  modified_base 3: mod_base = OTHER; note = 2'-O-methyladenosine-3'-phosphate
  modified_base 4: mod_base = OTHER; note = 2'-O-methyluridine-3'-phosphate
  modified_base 5: mod_base = OTHER; note = 2'-O-methyladenosine-3'-phosphate
  modified_base 6: mod_base = OTHER; note = 2'-O-methylguanosine-3'-phosphate
  modified_base 7: mod_base = OTHER; note = 2'-deoxy-2'-fluoroguanosine-3'-phosphate
  modified_base 8: mod_base = OTHER; note = 2'-O-methyladenosine-3'-phosphate
  modified_base 9: mod_base = OTHER; note = 2'-deoxy-2'-fluorouridine-3'-phosphate
  modified_base 10: mod_base = OTHER; note = 2'-deoxy-2'-fluorocytidine-3'-phosphate
  modified_base 11: mod_base = OTHER; note = 2'-deoxy-2'-fluorouridine-3'-phosphate
  modified_base 12: mod_base = OTHER; note = 2'-O-methyluridine-3'-phosphate
  modified_base 13: mod_base = OTHER; note = 2'-O-methyladenosine-3'-phosphate
  modified_base 14: mod_base = OTHER; note = 2'-O-methyluridine-3'-phosphate
  modified_base 15: mod_base = OTHER; note = 2'-O-methylguanosine-3'-phosphate
  modified_base 16: mod_base = OTHER; note = 2'-O-methyluridine-3'-phosphate
  modified_base 17: mod_base = OTHER; note = 2'-O-methyladenosine-3'-phosphate
  modified_base 18: mod_base = OTHER; note = 2'-O-methyladenosine-3'-phosphate
  modified_base 19: mod_base = OTHER; note = 2'-O-methyladenosine-3'-phosphate
  modified_base 20: mod_base = OTHER; note = 2'-O-methylcytidine-3'-phosphate
  modified_base 21: mod_base = OTHER; note = 2'-O-methyluridine-3'-phosphate ((2S,4R)-1-[29-[[2-(acetylamino)-2-deoxy-beta-D-galactopyra nosyl]oxy]-14,14-bis[[3-[[3-[[5-[[2-(acetylamino)-2-deoxy-b eta-D-galactopyranosyl]oxy]-1-oxopentyl]amino]propyl]amino] -3-oxopropoxy]methyl]-1,12,19,25-tetraoxo-16-oxa-13,20,24-t riazanonacos-1-yl]-4-hydroxy-2-pyrrolidinyl)methyl ester
ctataggatcttatgtaaact

SEQ ID NO: 1876 - RNA, 21 nt, synthetic construct
  source 1..21: mol_type = other RNA
  modified_base 1: mod_base = OTHER; note = 2'-O-methylguanosine-3'-phosphorothioate
  modified_base 2: mod_base = OTHER; note = 2'-O-methylguanosine-3'-phosphorothioate
  modified_base 3: mod_base = OTHER; note = 2'-O-methyladenosine-3'-phosphate
  modified_base 4: mod_base = OTHER; note = 2'-O-methyluridine-3'-phosphate
  modified_base 5: mod_base = OTHER; note = 2'-O-methylcytidine-3'-phosphate
  modified_base 6: mod_base = OTHER; note = 2'-O-methyluridine-3'-phosphate
  modified_base 7: mod_base = OTHER; note = 2'-deoxy-2'-fluorouridine-3'-phosphate
  modified_base 8: mod_base = OTHER; note = 2'-O-methyladenosine-3'-phosphate
  modified_base 9: mod_base = OTHER; note = 2'-deoxy-2'-fluorouridine-3'-phosphate
  modified_base 10: mod_base = OTHER; note = 2'-deoxy-2'-fluoroguanosine-3'-phosphate
  modified_base 11: mod_base = OTHER; note = 2'-deoxy-2'-fluorouridine-3'-phosphate
  modified_base 12: mod_base = OTHER; note = 2'-O-methyladenosine-3'-phosphate
  modified_base 13: mod_base = OTHER; note = 2'-O-methyladenosine-3'-phosphate
  modified_base 14: mod_base = OTHER; note = 2'-O-methyladenosine-3'-phosphate
  modified_base 15: mod_base = OTHER; note = 2'-O-methylcytidine-3'-phosphate
  modified_base 16: mod_base = OTHER; note = 2'-O-methyladenosine-3'-phosphate
  modified_base 17: mod_base = OTHER; note = 2'-O-methylguanosine-3'-phosphate
  modified_base 18: mod_base = OTHER; note = 2'-O-methyluridine-3'-phosphate
  modified_base 19: mod_base = OTHER; note = 2'-O-methyluridine-3'-phosphate
  modified_base 20: mod_base = OTHER; note = 2'-O-methyluridine-3'-phosphate
  modified_base 21: mod_base = OTHER; note = 2'-O-methyluridine-3'-phosphate ((2S,4R)-1-[29-[[2-(acetylamino)-2-deoxy-beta-D-galactopyra nosyl]oxy]-14,14-bis[[3-[[3-[[5-[[2-(acetylamino)-2-deoxy-b eta-D-galactopyranosyl]oxy]-1-oxopentyl]amino]propyl]amino] -3-oxopropoxy]methyl]-1,12,19,25-tetraoxo-16-oxa-13,20,24-t riazanonacos-1-yl]-4-hydroxy-2-pyrrolidinyl)methyl ester
ggatcttatgtaaacagtttt

SEQ ID NO: 1877 - RNA, 21 nt, synthetic construct
  source 1..21: mol_type = other RNA
  modified_base 1: mod_base = OTHER; note = 2'-O-methyladenosine-3'-phosphorothioate
  modified_base 2: mod_base = OTHER; note = 2'-O-methyladenosine-3'-phosphorothioate
  modified_base 3: mod_base = OTHER; note = 2'-O-methyladenosine-3'-phosphate
  modified_base 4: mod_base = OTHER; note = 2'-O-methylcytidine-3'-phosphate
  modified_base 5: mod_base = OTHER; note = 2'-O-methyladenosine-3'-phosphate
  modified_base 6: mod_base = OTHER; note = 2'-O-methylguanosine-3'-phosphate
  modified_base 7: mod_base = OTHER; note = 2'-deoxy-2'-fluorouridine-3'-phosphate
  modified_base 8: mod_base = OTHER; note = 2'-O-methyluridine-3'-phosphate
  modified_base 9: mod_base = OTHER; note = 2'-deoxy-2'-fluorouridine-3'-phosphate
  modified_base 10: mod_base = OTHER; note = 2'-deoxy-2'-fluorouridine-3'-phosphate
  modified_base 11: mod_base = OTHER; note = 2'-deoxy-2'-fluorouridine-3'-phosphate
  modified_base 12: mod_base = OTHER; note = 2'-O-methylguanosine-3'-phosphate
  modified_base 13: mod_base = OTHER; note = 2'-O-methyluridine-3'-phosphate
  modified_base 14: mod_base = OTHER; note = 2'-O-methyluridine-3'-phosphate
  modified_base 15: mod_base = OTHER; note = 2'-O-methyluridine-3'-phosphate
  modified_base 16: mod_base = OTHER; note = 2'-O-methylcytidine-3'-phosphate
  modified_base 17: mod_base = OTHER; note = 2'-O-methyluridine-3'-phosphate
  modified_base 18: mod_base = OTHER; note = 2'-O-methylguanosine-3'-phosphate
  modified_base 19: mod_base = OTHER; note = 2'-O-methyladenosine-3'-phosphate
  modified_base 20: mod_base = OTHER; note = 2'-O-methyluridine-3'-phosphate
  modified_base 21: mod_base = OTHER; note = 2'-O-methyluridine-3'-phosphate ((2S,4R)-1-[29-[[2-(acetylamino)-2-deoxy-beta-D-galactopyra nosyl]oxy]-14,14-bis[[3-[[3-[[5-[[2-(acetylamino)-2-deoxy-b eta-D-galactopyranosyl]oxy]-1-oxopentyl]amino]propyl]amino] -3-oxopropoxy]methyl]-1,12,19,25-tetraoxo-16-oxa-13,20,24-t riazanonacos-1-yl]-4-hydroxy-2-pyrrolidinyl)methyl ester
aaacagtttttgtttctgatt

SEQ ID NO: 1878 - RNA, 21 nt, synthetic construct
  source 1..21: mol_type = other RNA
  modified_base 1: mod_base = OTHER; note = 2'-O-methylguanosine-3'-phosphorothioate
  modified_base 2: mod_base = OTHER; note = 2'-O-methyluridine-3'-phosphorothioate
  modified_base 3: mod_base = OTHER; note = 2'-O-methyluridine-3'-phosphate
  modified_base 4: mod_base = OTHER; note = 2'-O-methyluridine-3'-phosphate
  modified_base 5: mod_base = OTHER; note = 2'-O-methyluridine-3'-phosphate
  modified_base 6: mod_base = OTHER; note = 2'-O-methyluridine-3'-phosphate
  modified_base 7: mod_base = OTHER; note = 2'-deoxy-2'-fluoroguanosine-3'-phosphate
  modified_base 8: mod_base = OTHER; note = 2'-O-methyluridine-3'-phosphate
  modified_base 9: mod_base = OTHER; note = 2'-deoxy-2'-fluorouridine-3'-phosphate
  modified_base 10: mod_base = OTHER; note = 2'-deoxy-2'-fluorouridine-3'-phosphate
  modified_base 11: mod_base = OTHER; note = 2'-deoxy-2'-fluorocytidine-3'-phosphate
  modified_base 12: mod_base = OTHER; note = 2'-O-methyluridine-3'-phosphate
  modified_base 13: mod_base = OTHER; note = 2'-O-methylguanosine-3'-phosphate
  modified_base 14: mod_base = OTHER; note = 2'-O-methyladenosine-3'-phosphate
  modified_base 15: mod_base = OTHER; note = 2'-O-methyluridine-3'-phosphate
  modified_base 16: mod_base = OTHER; note = 2'-O-methyladenosine-3'-phosphate
  modified_base 17: mod_base = OTHER; note = 2'-O-methylguanosine-3'-phosphate
  modified_base 18: mod_base = OTHER; note = 2'-O-methyluridine-3'-phosphate
  modified_base 19: mod_base = OTHER; note = 2'-O-methyladenosine-3'-phosphate
  modified_base 20: mod_base = OTHER; note = 2'-O-methyladenosine-3'-phosphate
  modified_base 21: mod_base = OTHER; note = 2'-O-methyluridine-3'-phosphate ((2S,4R)-1-[29-[[2-(acetylamino)-2-deoxy-beta-D-galactopyra nosyl]oxy]-14,14-bis[[3-[[3-[[5-[[2-(acetylamino)-2-deoxy-b eta-D-galactopyranosyl]oxy]-1-oxopentyl]amino]propyl]amino] -3-oxopropoxy]methyl]-1,12,19,25-tetraoxo-16-oxa-13,20,24-t riazanonacos-1-yl]-4-hydroxy-2-pyrrolidinyl)methyl ester
gtttttgtttctgatagtaat

SEQ ID NO: 1879 - RNA, 21 nt, synthetic construct
  source 1..21: mol_type = other RNA
  modified_base 1: mod_base = OTHER; note = 2'-O-methyluridine-3'-phosphorothioate
  modified_base 2: mod_base = OTHER; note = 2'-O-methylguanosine-3'-phosphorothioate
  modified_base 3: mod_base = OTHER; note = 2'-O-methyluridine-3'-phosphate
  modified_base 4: mod_base = OTHER; note = 2'-O-methyluridine-3'-phosphate
  modified_base 5: mod_base = OTHER; note = 2'-O-methyluridine-3'-phosphate
  modified_base 6: mod_base = OTHER; note = 2'-O-methylcytidine-3'-phosphate
  modified_base 7: mod_base = OTHER; note = 2'-deoxy-2'-fluorouridine-3'-phosphate
  modified_base 8: mod_base = OTHER; note = 2'-O-methylguanosine-3'-phosphate
  modified_base 9: mod_base = OTHER; note = 2'-deoxy-2'-fluoroadenosine-3'-phosphate
  modified_base 10: mod_base = OTHER; note = 2'-deoxy-2'-fluorouridine-3'-phosphate
  modified_base 11: mod_base = OTHER; note = 2'-deoxy-2'-fluoroadenosine-3'-phosphate
  modified_base 12: mod_base = OTHER; note = 2'-O-methylguanosine-3'-phosphate
  modified_base 13: mod_base = OTHER; note = 2'-O-methyluridine-3'-phosphate
  modified_base 14: mod_base = OTHER; note = 2'-O-methyladenosine-3'-phosphate
  modified_base 15: mod_base = OTHER; note = 2'-O-methyladenosine-3'-phosphate
  modified_base 16: mod_base = OTHER; note = 2'-O-methyluridine-3'-phosphate
  modified_base 17: mod_base = OTHER; note = 2'-O-methylguanosine-3'-phosphate
  modified_base 18: mod_base = OTHER; note = 2'-O-methylguanosine-3'-phosphate
  modified_base 19: mod_base = OTHER; note = 2'-O-methyladenosine-3'-phosphate
  modified_base 20: mod_base = OTHER; note = 2'-O-methylcytidine-3'-phosphate
  modified_base 21: mod_base = OTHER; note = 2'-O-methyluridine-3'-phosphate ((2S,4R)-1-[29-[[2-(acetylamino)-2-deoxy-beta-D-galactopyra nosyl]oxy]-14,14-bis[[3-[[3-[[5-[[2-(acetylamino)-2-deoxy-b eta-D-galactopyranosyl]oxy]-1-oxopentyl]amino]propyl]amino] -3-oxopropoxy]methyl]-1,12,19,25-tetraoxo-16-oxa-13,20,24-t riazanonacos-1-yl]-4-hydroxy-2-pyrrolidinyl)methyl ester
tgtttctgatagtaatggact

SEQ ID NO: 1880 - RNA, 21 nt, synthetic construct
  source 1..21: mol_type = other RNA
  modified_base 1: mod_base = OTHER; note = 2'-O-methylcytidine-3'-phosphorothioate
  modified_base 2: mod_base = OTHER; note = 2'-O-methyluridine-3'-phosphorothioate
  modified_base 3: mod_base = OTHER; note = 2'-O-methylguanosine-3'-phosphate
  modified_base 4: mod_base = OTHER; note = 2'-O-methyladenosine-3'-phosphate
  modified_base 5: mod_base = OTHER; note = 2'-O-methyluridine-3'-phosphate
  modified_base 6: mod_base = OTHER; note = 2'-O-methyladenosine-3'-phosphate
  modified_base 7: mod_base = OTHER; note = 2'-deoxy-2'-fluoroguanosine-3'-phosphate
  modified_base 8: mod_base = OTHER; note = 2'-O-methyluridine-3'-phosphate
  modified_base 9: mod_base = OTHER; note = 2'-deoxy-2'-fluoroadenosine-3'-phosphate
  modified_base 10: mod_base = OTHER; note = 2'-deoxy-2'-fluoroadenosine-3'-phosphate
  modified_base 11: mod_base = OTHER; note = 2'-deoxy-2'-fluorouridine-3'-phosphate
  modified_base 12: mod_base = OTHER; note = 2'-O-methylguanosine-3'-phosphate
  modified_base 13: mod_base = OTHER; note = 2'-O-methylguanosine-3'-phosphate
  modified_base 14: mod_base = OTHER; note = 2'-O-methyladenosine-3'-phosphate
  modified_base 15: mod_base = OTHER; note = 2'-O-methylcytidine-3'-phosphate
  modified_base 16: mod_base = OTHER; note = 2'-O-methyluridine-3'-phosphate
  modified_base 17: mod_base = OTHER; note = 2'-O-methyluridine-3'-phosphate
  modified_base 18: mod_base = OTHER; note = 2'-O-methyluridine-3'-phosphate
  modified_base 19: mod_base = OTHER; note = 2'-O-methyladenosine-3'-phosphate
  modified_base 20: mod_base = OTHER; note = 2'-O-methyluridine-3'-phosphate
  modified_base 21: mod_base = OTHER; note = 2'-O-methyluridine-3'-phosphate ((2S,4R)-1-[29-[[2-(acetylamino)-2-deoxy-beta-D-galactopyra nosyl]oxy]-14,14-bis[[3-[[3-[[5-[[2-(acetylamino)-2-deoxy-b eta-D-galactopyranosyl]oxy]-1-oxopentyl]amino]propyl]amino] -3-oxopropoxy]methyl]-1,12,19,25-tetraoxo-16-oxa-13,20,24-t riazanonacos-1-yl]-4-hydroxy-2-pyrrolidinyl)methyl ester
ctgatagtaatggactttatt

SEQ ID NO: 1881 - RNA, 21 nt, synthetic construct
  source 1..21: mol_type = other RNA
  modified_base 1: mod_base = OTHER; note = 2'-O-methyladenosine-3'-phosphorothioate
  modified_base 2: mod_base = OTHER; note = 2'-O-methyladenosine-3'-phosphorothioate
  modified_base 3: mod_base = OTHER; note = 2'-O-methyluridine-3'-phosphate
  modified_base 4: mod_base = OTHER; note = 2'-O-methylguanosine-3'-phosphate
  modified_base 5: mod_base = OTHER; note = 2'-O-methylguanosine-3'-phosphate
  modified_base 6: mod_base = OTHER; note = 2'-O-methyladenosine-3'-phosphate
  modified_base 7: mod_base = OTHER; note = 2'-deoxy-2'-fluorocytidine-3'-phosphate
  modified_base 8: mod_base = OTHER; note = 2'-O-methyluridine-3'-phosphate
  modified_base 9: mod_base = OTHER; note = 2'-deoxy-2'-fluorouridine-3'-phosphate
  modified_base 10: mod_base = OTHER; note = 2'-deoxy-2'-fluorouridine-3'-phosphate
  modified_base 11: mod_base = OTHER; note = 2'-deoxy-2'-fluoroadenosine-3'-phosphate
  modified_base 12: mod_base = OTHER; note = 2'-O-methyluridine-3'-phosphate
  modified_base 13: mod_base = OTHER; note = 2'-O-methyluridine-3'-phosphate
  modified_base 14: mod_base = OTHER; note = 2'-O-methylcytidine-3'-phosphate
  modified_base 15: mod_base = OTHER; note = 2'-O-methyluridine-3'-phosphate
  modified_base 16: mod_base = OTHER; note = 2'-O-methyladenosine-3'-phosphate
  modified_base 17: mod_base = OTHER; note = 2'-O-methyladenosine-3'-phosphate
  modified_base 18: mod_base = OTHER; note = 2'-O-methylcytidine-3'-phosphate
  modified_base 19: mod_base = OTHER; note = 2'-O-methyluridine-3'-phosphate
  modified_base 20: mod_base = OTHER; note = 2'-O-methyluridine-3'-phosphate
  modified_base 21: mod_base = OTHER; note = 2'-O-methyluridine-3'-phosphate ((2S,4R)-1-[29-[[2-(acetylamino)-2-deoxy-beta-D-galactopyra nosyl]oxy]-14,14-bis[[3-[[3-[[5-[[2-(acetylamino)-2-deoxy-b eta-D-galactopyranosyl]oxy]-1-oxopentyl]amino]propyl]amino] -3-oxopropoxy]methyl]-1,12,19,25-tetraoxo-16-oxa-13,20,24-t riazanonacos-1-yl]-4-hydroxy-2-pyrrolidinyl)methyl ester
aatggactttattctaacttt

SEQ ID NO: 1882 - RNA, 21 nt, synthetic construct
  source 1..21: mol_type = other RNA
  modified_base 1: mod_base = OTHER; note = 2'-O-methyluridine-3'-phosphorothioate
  modified_base 2: mod_base = OTHER; note = 2'-O-methyluridine-3'-phosphorothioate
  modified_base 3: mod_base = OTHER; note = 2'-O-methyluridine-3'-phosphate
  modified_base 4: mod_base = OTHER; note = 2'-O-methyladenosine-3'-phosphate
  modified_base 5: mod_base = OTHER; note = 2'-O-methyluridine-3'-phosphate
  modified_base 6: mod_base = OTHER; note = 2'-O-methyluridine-3'-phosphate
  modified_base 7: mod_base = OTHER; note = 2'-deoxy-2'-fluorocytidine-3'-phosphate
  modified_base 8: mod_base = OTHER; note = 2'-O-methyluridine-3'-phosphate
  modified_base 9: mod_base = OTHER; note = 2'-deoxy-2'-fluoroadenosine-3'-phosphate
  modified_base 10: mod_base = OTHER; note = 2'-deoxy-2'-fluoroadenosine-3'-phosphate
  modified_base 11: mod_base = OTHER; note = 2'-deoxy-2'-fluorocytidine-3'-phosphate
  modified_base 12: mod_base = OTHER; note = 2'-O-methyluridine-3'-phosphate
  modified_base 13: mod_base = OTHER; note = 2'-O-methyluridine-3'-phosphate
  modified_base 14: mod_base = OTHER; note = 2'-O-methylguanosine-3'-phosphate
  modified_base 15: mod_base = OTHER; note = 2'-O-methyladenosine-3'-phosphate
  modified_base 16: mod_base = OTHER; note = 2'-O-methylguanosine-3'-phosphate
  modified_base 17: mod_base = OTHER; note = 2'-O-methyladenosine-3'-phosphate
  modified_base 18: mod_base = OTHER; note = 2'-O-methyluridine-3'-phosphate
  modified_base 19: mod_base = OTHER; note = 2'-O-methylcytidine-3'-phosphate
  modified_base 20: mod_base = OTHER; note = 2'-O-methyladenosine-3'-phosphate
  modified_base 21: mod_base = OTHER; note = 2'-O-methyluridine-3'-phosphate ((2S,4R)-1-[29-[[2-(acetylamino)-2-deoxy-beta-D-galactopyra nosyl]oxy]-14,14-bis[[3-[[3-[[5-[[2-(acetylamino)-2-deoxy-b eta-D-galactopyranosyl]oxy]-1-oxopentyl]amino]propyl]amino] -3-oxopropoxy]methyl]-1,12,19,25-tetraoxo-16-oxa-13,20,24-t riazanonacos-1-yl]-4-hydroxy-2-pyrrolidinyl)methyl ester
tttattctaacttgagatcat

SEQ ID NO: 1883 - RNA, 21 nt, synthetic construct
  source 1..21: mol_type = other RNA
  modified_base 1: mod_base = OTHER; note = 2'-O-methyluridine-3'-phosphorothioate
  modified_base 2: mod_base = OTHER; note = 2'-O-methylcytidine-3'-phosphorothioate
  modified_base 3: mod_base = OTHER; note = 2'-O-methyluridine-3'-phosphate
  modified_base 4: mod_base = OTHER; note = 2'-O-methyladenosine-3'-phosphate
  modified_base 5: mod_base = OTHER; note = 2'-O-methyladenosine-3'-phosphate
  modified_base 6: mod_base = OTHER; note = 2'-O-methylcytidine-3'-phosphate
  modified_base 7: mod_base = OTHER; note = 2'-deoxy-2'-fluorouridine-3'-phosphate
  modified_base 8: mod_base = OTHER; note = 2'-O-methyluridine-3'-phosphate
  modified_base 9: mod_base = OTHER; note = 2'-deoxy-2'-fluoroguanosine-3'-phosphate
  modified_base 10: mod_base = OTHER; note = 2'-deoxy-2'-fluoroadenosine-3'-phosphate
  modified_base 11: mod_base = OTHER; note = 2'-deoxy-2'-fluoroguanosine-3'-phosphate
  modified_base 12: mod_base = OTHER; note = 2'-O-methyladenosine-3'-phosphate
  modified_base 13: mod_base = OTHER; note = 2'-O-methyluridine-3'-phosphate
  modified_base 14: mod_base = OTHER; note = 2'-O-methylcytidine-3'-phosphate
  modified_base 15: mod_base = OTHER; note = 2'-O-methyladenosine-3'-phosphate
  modified_base 16: mod_base = OTHER; note = 2'-O-methylguanosine-3'-phosphate
  modified_base 17: mod_base = OTHER; note = 2'-O-methyluridine-3'-phosphate
  modified_base 18: mod_base = OTHER; note = 2'-O-methylguanosine-3'-phosphate
  modified_base 19: mod_base = OTHER; note = 2'-O-methylguanosine-3'-phosphate
  modified_base 20: mod_base = OTHER; note = 2'-O-methylcytidine-3'-phosphate
  modified_base 21: mod_base = OTHER; note = 2'-O-methyluridine-3'-phosphate ((2S,4R)-1-[29-[[2-(acetylamino)-2-deoxy-beta-D-galactopyra nosyl]oxy]-14,14-bis[[3-[[3-[[5-[[2-(acetylamino)-2-deoxy-b eta-D-galactopyranosyl]oxy]-1-oxopentyl]amino]propyl]amino] -3-oxopropoxy]methyl]-1,12,19,25-tetraoxo-16-oxa-13,20,24-t riazanonacos-1-yl]-4-hydroxy-2-pyrrolidinyl)methyl ester
tctaacttgagatcagtggct

SEQ ID NO: 1884 - RNA, 21 nt, synthetic construct
  source 1..21: mol_type = other RNA
  modified_base 1: mod_base = OTHER; note = 2'-O-methylguanosine-3'-phosphorothioate
  modified_base 2: mod_base = OTHER; note = 2'-O-methyladenosine-3'-phosphorothioate
  modified_base 3: mod_base = OTHER; note = 2'-O-methylguanosine-3'-phosphate
  modified_base 4: mod_base = OTHER; note = 2'-O-methyladenosine-3'-phosphate
  modified_base 5: mod_base = OTHER; note = 2'-O-methyluridine-3'-phosphate
  modified_base 6: mod_base = OTHER; note = 2'-O-methylcytidine-3'-phosphate
  modified_base 7: mod_base = OTHER; note = 2'-deoxy-2'-fluoroadenosine-3'-phosphate
  modified_base 8: mod_base = OTHER; note = 2'-O-methylguanosine-3'-phosphate
  modified_base 9: mod_base = OTHER; note = 2'-deoxy-2'-fluorouridine-3'-phosphate
  modified_base 10: mod_base = OTHER; note = 2'-deoxy-2'-fluoroguanosine-3'-phosphate
  modified_base 11: mod_base = OTHER; note = 2'-deoxy-2'-fluoroguanosine-3'-phosphate
  modified_base 12: mod_base = OTHER; note = 2'-O-methylcytidine-3'-phosphate
  modified_base 13: mod_base = OTHER; note = 2'-O-methylguanosine-3'-phosphate
  modified_base 14: mod_base = OTHER; note = 2'-O-methylguanosine-3'-phosphate
  modified_base 15: mod_base = OTHER; note = 2'-O-methyladenosine-3'-phosphate
  modified_base 16: mod_base = OTHER; note = 2'-O-methyluridine-3'-phosphate
  modified_base 17: mod_base = OTHER; note = 2'-O-methylcytidine-3'-phosphate
  modified_base 18: mod_base = OTHER; note = 2'-O-methyladenosine-3'-phosphate
  modified_base 19: mod_base = OTHER; note = 2'-O-methyladenosine-3'-phosphate
  modified_base 20: mod_base = OTHER; note = 2'-O-methyladenosine-3'-phosphate
  modified_base 21: mod_base = OTHER; note = 2'-O-methyluridine-3'-phosphate ((2S,4R)-1-[29-[[2-(acetylamino)-2-deoxy-beta-D-galactopyra nosyl]oxy]-14,14-bis[[3-[[3-[[5-[[2-(acetylamino)-2-deoxy-b eta-D-galactopyranosyl]oxy]-1-oxopentyl]amino]propyl]amino] -3-oxopropoxy]methyl]-1,12,19,25-tetraoxo-16-oxa-13,20,24-t riazanonacos-1-yl]-4-hydroxy-2-pyrrolidinyl)methyl ester
gagatcagtggcggatcaaat

SEQ ID NO: 1885 - RNA, 21 nt, synthetic construct
  source 1..21: mol_type = other RNA
  modified_base 1: mod_base = OTHER; note = 2'-O-methylcytidine-3'-phosphorothioate
  modified_base 2: mod_base = OTHER; note = 2'-O-methyladenosine-3'-phosphorothioate
  modified_base 3: mod_base = OTHER; note = 2'-O-methylguanosine-3'-phosphate
  modified_base 4: mod_base = OTHER; note = 2'-O-methyluridine-3'-phosphate
  modified_base 5: mod_base = OTHER; note = 2'-O-methylguanosine-3'-phosphate
  modified_base 6: mod_base = OTHER; note = 2'-O-methylguanosine-3'-phosphate
  modified_base 7: mod_base = OTHER; note = 2'-deoxy-2'-fluorocytidine-3'-phosphate
  modified_base 8: mod_base = OTHER; note = 2'-O-methylguanosine-3'-phosphate
  modified_base 9: mod_base = OTHER; note = 2'-deoxy-2'-fluoroguanosine-3'-phosphate
  modified_base 10: mod_base = OTHER; note = 2'-deoxy-2'-fluoroadenosine-3'-phosphate
  modified_base 11: mod_base = OTHER; note = 2'-deoxy-2'-fluorouridine-3'-phosphate
  modified_base 12: mod_base = OTHER; note = 2'-O-methylcytidine-3'-phosphate
  modified_base 13: mod_base = OTHER; note = 2'-O-methyladenosine-3'-phosphate
  modified_base 14: mod_base = OTHER; note = 2'-O-methyladenosine-3'-phosphate
  modified_base 15: mod_base = OTHER; note = 2'-O-methyladenosine-3'-phosphate
  modified_base 16: mod_base = OTHER; note = 2'-O-methyladenosine-3'-phosphate
  modified_base 17: mod_base = OTHER; note = 2'-O-methylcytidine-3'-phosphate
  modified_base 18: mod_base = OTHER; note = 2'-O-methylcytidine-3'-phosphate
  modified_base 19: mod_base = OTHER; note = 2'-O-methyluridine-3'-phosphate
  modified_base 20: mod_base = OTHER; note = 2'-O-methyladenosine-3'-phosphate
  modified_base 21: mod_base = OTHER; note = 2'-O-methyluridine-3'-phosphate ((2S,4R)-1-[29-[[2-(acetylamino)-2-deoxy-beta-D-galactopyra nosyl]oxy]-14,14-bis[[3-[[3-[[5-[[2-(acetylamino)-2-deoxy-b eta-D-galactopyranosyl]oxy]-1-oxopentyl]amino]propyl]amino] -3-oxopropoxy]methyl]-1,12,19,25-tetraoxo-16-oxa-13,20,24-t riazanonacos-1-yl]-4-hydroxy-2-pyrrolidinyl)methyl ester
cagtggcggatcaaaacctat

SEQ ID NO: 1886 - RNA, 21 nt, synthetic construct
  source 1..21: mol_type = other RNA
  modified_base 1: mod_base = OTHER; note = 2'-O-methylguanosine-3'-phosphorothioate
  modified_base 2: mod_base = OTHER; note = 2'-O-methylguanosine-3'-phosphorothioate
  modified_base 3: mod_base = OTHER; note = 2'-O-methyladenosine-3'-phosphate
  modified_base 4: mod_base = OTHER; note = 2'-O-methyluridine-3'-phosphate
  modified_base 5: mod_base = OTHER; note = 2'-O-methylcytidine-3'-phosphate
  modified_base 6: mod_base = OTHER; note = 2'-O-methyladenosine-3'-phosphate
  modified_base 7: mod_base = OTHER; note = 2'-deoxy-2'-fluoroadenosine-3'-phosphate
  modified_base 8: mod_base = OTHER; note = 2'-O-methyladenosine-3'-phosphate
  modified_base 9: mod_base = OTHER; note = 2'-deoxy-2'-fluoroadenosine-3'-phosphate
  modified_base 10: mod_base = OTHER; note = 2'-deoxy-2'-fluorocytidine-3'-phosphate
  modified_base 11: mod_base = OTHER; note = 2'-deoxy-2'-fluorocytidine-3'-phosphate
  modified_base 12: mod_base = OTHER; note = 2'-O-methyluridine-3'-phosphate
  modified_base 13: mod_base = OTHER; note = 2'-O-methyladenosine-3'-phosphate
  modified_base 14: mod_base = OTHER; note = 2'-O-methylcytidine-3'-phosphate
  modified_base 15: mod_base = OTHER; note = 2'-O-methyladenosine-3'-phosphate
  modified_base 16: mod_base = OTHER; note = 2'-O-methyladenosine-3'-phosphate
  modified_base 17: mod_base = OTHER; note = 2'-O-methylguanosine-3'-phosphate
  modified_base 18: mod_base = OTHER; note = 2'-O-methyladenosine-3'-phosphate
  modified_base 19: mod_base = OTHER; note = 2'-O-methyluridine-3'-phosphate
  modified_base 20: mod_base = OTHER; note = 2'-O-methyluridine-3'-phosphate
  modified_base 21: mod_base = OTHER; note = 2'-O-methyluridine-3'-phosphate ((2S,4R)-1-[29-[[2-(acetylamino)-2-deoxy-beta-D-galactopyra nosyl]oxy]-14,14-bis[[3-[[3-[[5-[[2-(acetylamino)-2-deoxy-b eta-D-galactopyranosyl]oxy]-1-oxopentyl]amino]propyl]amino] -3-oxopropoxy]methyl]-1,12,19,25-tetraoxo-16-oxa-13,20,24-t riazanonacos-1-yl]-4-hydroxy-2-pyrrolidinyl)methyl ester
ggatcaaaacctacaagattt

SEQ ID NO: 1887 - RNA, 21 nt, synthetic construct
  source 1..21: mol_type = other RNA
  modified_base 1: mod_base = OTHER; note = 2'-O-methyladenosine-3'-phosphorothioate
  modified_base 2: mod_base = OTHER; note = 2'-O-methyladenosine-3'-phosphorothioate
  modified_base 3: mod_base = OTHER; note = 2'-O-methyladenosine-3'-phosphate
  modified_base 4: mod_base = OTHER; note = 2'-O-methyladenosine-3'-phosphate
  modified_base 5: mod_base = OTHER; note = 2'-O-methylcytidine-3'-phosphate
  modified_base 6: mod_base = OTHER; note = 2'-O-methylcytidine-3'-phosphate
  modified_base 7: mod_base = OTHER; note = 2'-deoxy-2'-fluorouridine-3'-phosphate
  modified_base 8: mod_base = OTHER; note = 2'-O-methyladenosine-3'-phosphate
  modified_base 9: mod_base = OTHER; note = 2'-deoxy-2'-fluorocytidine-3'-phosphate
  modified_base 10: mod_base = OTHER; note = 2'-deoxy-2'-fluoroadenosine-3'-phosphate
  modified_base 11: mod_base = OTHER; note = 2'-deoxy-2'-fluoroadenosine-3'-phosphate
  modified_base 12: mod_base = OTHER; note = 2'-O-methylguanosine-3'-phosphate
  modified_base 13: mod_base = OTHER; note = 2'-O-methyladenosine-3'-phosphate
  modified_base 14: mod_base = OTHER; note = 2'-O-methyluridine-3'-phosphate
  modified_base 15: mod_base = OTHER; note = 2'-O-methyluridine-3'-phosphate
  modified_base 16: mod_base = OTHER; note = 2'-O-methylcytidine-3'-phosphate
  modified_base 17: mod_base = OTHER; note = 2'-O-methyladenosine-3'-phosphate
  modified_base 18: mod_base = OTHER; note = 2'-O-methyladenosine-3'-phosphate
  modified_base 19: mod_base = OTHER; note = 2'-O-methylcytidine-3'-phosphate
  modified_base 20: mod_base = OTHER; note = 2'-O-methyluridine-3'-phosphate
  modified_base 21: mod_base = OTHER; note = 2'-O-methyluridine-3'-phosphate ((2S,4R)-1-[29-[[2-(acetylamino)-2-deoxy-beta-D-galactopyra nosyl]oxy]-14,14-bis[[3-[[3-[[5-[[2-(acetylamino)-2-deoxy-b eta-D-galactopyranosyl]oxy]-1-oxopentyl]amino]propyl]amino] -3-oxopropoxy]methyl]-1,12,19,25-tetraoxo-16-oxa-13,20,24-t riazanonacos-1-yl]-4-hydroxy-2-pyrrolidinyl)methyl ester
aaaacctacaagattcaactt

SEQ ID NO: 1888 - RNA, 21 nt, synthetic construct
  source 1..21: mol_type = other RNA
  modified_base 1: mod_base = OTHER; note = 2'-O-methylcytidine-3'-phosphorothioate
  modified_base 2: mod_base = OTHER; note = 2'-O-methyluridine-3'-phosphorothioate
  modified_base 3: mod_base = OTHER; note = 2'-O-methyladenosine-3'-phosphate
  modified_base 4: mod_base = OTHER; note = 2'-O-methylcytidine-3'-phosphate
  modified_base 5: mod_base = OTHER; note = 2'-O-methyladenosine-3'-phosphate
  modified_base 6: mod_base = OTHER; note = 2'-O-methyladenosine-3'-phosphate
  modified_base 7: mod_base = OTHER; note = 2'-deoxy-2'-fluoroguanosine-3'-phosphate
  modified_base 8: mod_base = OTHER; note = 2'-O-methyladenosine-3'-phosphate
  modified_base 9: mod_base = OTHER; note = 2'-deoxy-2'-fluorouridine-3'-phosphate
  modified_base 10: mod_base = OTHER; note = 2'-deoxy-2'-fluorouridine-3'-phosphate
  modified_base 11: mod_base = OTHER; note = 2'-deoxy-2'-fluorocytidine-3'-phosphate
  modified_base 12: mod_base = OTHER; note = 2'-O-methyladenosine-3'-phosphate
  modified_base 13: mod_base = OTHER; note = 2'-O-methyladenosine-3'-phosphate
  modified_base 14: mod_base = OTHER; note = 2'-O-methylcytidine-3'-phosphate
  modified_base 15: mod_base = OTHER; note = 2'-O-methyluridine-3'-phosphate
  modified_base 16: mod_base = OTHER; note = 2'-O-methylguanosine-3'-phosphate
  modified_base 17: mod_base = OTHER; note = 2'-O-methyladenosine-3'-phosphate
  modified_base 18: mod_base = OTHER; note = 2'-O-methyladenosine-3'-phosphate
  modified_base 19: mod_base = OTHER; note = 2'-O-methyladenosine-3'-phosphate
  modified_base 20: mod_base = OTHER; note = 2'-O-methyladenosine-3'-phosphate
  modified_base 21: mod_base = OTHER; note = 2'-O-methyluridine-3'-phosphate ((2S,4R)-1-[29-[[2-(acetylamino)-2-deoxy-beta-D-galactopyra nosyl]oxy]-14,14-bis[[3-[[3-[[5-[[2-(acetylamino)-2-deoxy-b eta-D-galactopyranosyl]oxy]-1-oxopentyl]amino]propyl]amino] -3-oxopropoxy]methyl]-1,12,19,25-tetraoxo-16-oxa-13,20,24-t riazanonacos-1-yl]-4-hydroxy-2-pyrrolidinyl)methyl ester
ctacaagattcaactgaaaat

SEQ ID NO: 1889 - RNA, 21 nt, synthetic construct
  source 1..21: mol_type = other RNA
  modified_base 1: mod_base = OTHER; note = 2'-O-methyladenosine-3'-phosphorothioate
  modified_base 2: mod_base = OTHER; note = 2'-O-methylguanosine-3'-phosphorothioate
  modified_base 3: mod_base = OTHER; note = 2'-O-methyladenosine-3'-phosphate
  modified_base 4: mod_base = OTHER; note = 2'-O-methyluridine-3'-phosphate
  modified_base 5: mod_base = OTHER; note = 2'-O-methyluridine-3'-phosphate
  modified_base 6: mod_base = OTHER; note = 2'-O-methylcytidine-3'-phosphate
  modified_base 7: mod_base = OTHER; note = 2'-deoxy-2'-fluoroadenosine-3'-phosphate
  modified_base 8: mod_base = OTHER; note = 2'-O-methyladenosine-3'-phosphate
  modified_base 9: mod_base = OTHER; note = 2'-deoxy-2'-fluorocytidine-3'-phosphate
  modified_base 10: mod_base = OTHER; note = 2'-deoxy-2'-fluorouridine-3'-phosphate
  modified_base 11: mod_base = OTHER; note = 2'-deoxy-2'-fluoroguanosine-3'-phosphate
  modified_base 12: mod_base = OTHER; note = 2'-O-methyladenosine-3'-phosphate
  modified_base 13: mod_base = OTHER; note = 2'-O-methyladenosine-3'-phosphate
  modified_base 14: mod_base = OTHER; note = 2'-O-methyladenosine-3'-phosphate
  modified_base 15: mod_base = OTHER; note = 2'-O-methyladenosine-3'-phosphate
  modified_base 16: mod_base = OTHER; note = 2'-O-methylguanosine-3'-phosphate
  modified_base 17: mod_base = OTHER; note = 2'-O-methyluridine-3'-phosphate
  modified_base 18: mod_base = OTHER; note = 2'-O-methyluridine-3'-phosphate
  modified_base 19: mod_base = OTHER; note = 2'-O-methylguanosine-3'-phosphate
  modified_base 20: mod_base = OTHER; note = 2'-O-methylguanosine-3'-phosphate
  modified_base 21: mod_base = OTHER; note = 2'-O-methyluridine-3'-phosphate ((2S,4R)-1-[29-[[2-(acetylamino)-2-deoxy-beta-D-galactopyra nosyl]oxy]-14,14-bis[[3-[[3-[[5-[[2-(acetylamino)-2-deoxy-b eta-D-galactopyranosyl]oxy]-1-oxopentyl]amino]propyl]amino] -3-oxopropoxy]methyl]-1,12,19,25-tetraoxo-16-oxa-13,20,24-t riazanonacos-1-yl]-4-hydroxy-2-pyrrolidinyl)methyl ester
agattcaactgaaaagttggt

SEQ ID NO: 1890 - RNA, 21 nt, synthetic construct
  source 1..21: mol_type = other RNA
  modified_base 1: mod_base = OTHER; note = 2'-O-methyladenosine-3'-phosphorothioate
  modified_base 2: mod_base = OTHER; note = 2'-O-methyladenosine-3'-phosphorothioate
  modified_base 3: mod_base = OTHER; note = 2'-O-methylcytidine-3'-phosphate
  modified_base 4: mod_base = OTHER; note = 2'-O-methyluridine-3'-phosphate
  modified_base 5: mod_base = OTHER; note = 2'-O-methylguanosine-3'-phosphate
  modified_base 6: mod_base = OTHER; note = 2'-O-methyladenosine-3'-phosphate
  modified_base 7: mod_base = OTHER; note = 2'-deoxy-2'-fluoroadenosine-3'-phosphate
  modified_base 8: mod_base = OTHER; note = 2'-O-methyladenosine-3'-phosphate
  modified_base 9: mod_base = OTHER; note = 2'-deoxy-2'-fluoroadenosine-3'-phosphate
  modified_base 10: mod_base = OTHER; note = 2'-deoxy-2'-fluoroguanosine-3'-phosphate
  modified_base 11: mod_base = OTHER; note = 2'-deoxy-2'-fluorouridine-3'-phosphate
  modified_base 12: mod_base = OTHER; note = 2'-O-methyluridine-3'-phosphate
  modified_base 13: mod_base = OTHER; note = 2'-O-methylguanosine-3'-phosphate
  modified_base 14: mod_base = OTHER; note = 2'-O-methylguanosine-3'-phosphate
  modified_base 15: mod_base = OTHER; note = 2'-O-methylcytidine-3'-phosphate
  modified_base 16: mod_base = OTHER; note = 2'-O-methyladenosine-3'-phosphate
  modified_base 17: mod_base = OTHER; note = 2'-O-methylguanosine-3'-phosphate
  modified_base 18: mod_base = OTHER; note = 2'-O-methyluridine-3'-phosphate
  modified_base 19: mod_base = OTHER; note = 2'-O-methyluridine-3'-phosphate
  modified_base 20: mod_base = OTHER; note = 2'-O-methyladenosine-3'-phosphate
  modified_base 21: mod_base = OTHER; note = 2'-O-methyluridine-3'-phosphate ((2S,4R)-1-[29-[[2-(acetylamino)-2-deoxy-beta-D-galactopyra nosyl]oxy]-14,14-bis[[3-[[3-[[5-[[2-(acetylamino)-2-deoxy-b eta-D-galactopyranosyl]oxy]-1-oxopentyl]amino]propyl]amino] -3-oxopropoxy]methyl]-1,12,19,25-tetraoxo-16-oxa-13,20,24-t riazanonacos-1-yl]-4-hydroxy-2-pyrrolidinyl)methyl ester
aactgaaaagttggcagttat

SEQ ID NO: 1891 - RNA, 21 nt, synthetic construct
  source 1..21: mol_type = other RNA
  modified_base 1: mod_base = OTHER; note = 2'-O-methyladenosine-3'-phosphorothioate
  modified_base 2: mod_base = OTHER; note = 2'-O-methyladenosine-3'-phosphorothioate
  modified_base 3: mod_base = OTHER; note = 2'-O-methyladenosine-3'-phosphate
  modified_base 4: mod_base = OTHER; note = 2'-O-methylguanosine-3'-phosphate
  modified_base 5: mod_base = OTHER; note = 2'-O-methyluridine-3'-phosphate
  modified_base 6: mod_base = OTHER; note = 2'-O-methyluridine-3'-phosphate
  modified_base 7: mod_base = OTHER; note = 2'-deoxy-2'-fluoroguanosine-3'-phosphate
  modified_base 8: mod_base = OTHER; note = 2'-O-methylguanosine-3'-phosphate
  modified_base 9: mod_base = OTHER; note = 2'-deoxy-2'-fluorocytidine-3'-phosphate
  modified_base 10: mod_base = OTHER; note = 2'-deoxy-2'-fluoroadenosine-3'-phosphate
  modified_base 11: mod_base = OTHER; note = 2'-deoxy-2'-fluoroguanosine-3'-phosphate
  modified_base 12: mod_base = OTHER; note = 2'-O-methyluridine-3'-phosphate
  modified_base 13: mod_base = OTHER; note = 2'-O-methyluridine-3'-phosphate
  modified_base 14: mod_base = OTHER; note = 2'-O-methyladenosine-3'-phosphate
  modified_base 15: mod_base = OTHER; note = 2'-O-methyluridine-3'-phosphate
  modified_base 16: mod_base = OTHER; note = 2'-O-methylguanosine-3'-phosphate
  modified_base 17: mod_base = OTHER; note = 2'-O-methylguanosine-3'-phosphate
  modified_base 18: mod_base = OTHER; note = 2'-O-methyluridine-3'-phosphate
  modified_base 19: mod_base = OTHER; note = 2'-O-methyluridine-3'-phosphate
  modified_base 20: mod_base = OTHER; note = 2'-O-methyluridine-3'-phosphate
  modified_base 21: mod_base = OTHER; note = 2'-O-methyluridine-3'-phosphate ((2S,4R)-1-[29-[[2-(acetylamino)-2-deoxy-beta-D-galactopyra nosyl]oxy]-14,14-bis[[3-[[3-[[5-[[2-(acetylamino)-2-deoxy-b eta-D-galactopyranosyl]oxy]-1-oxopentyl]amino]propyl]amino] -3-oxopropoxy]methyl]-1,12,19,25-tetraoxo-16-oxa-13,20,24-t riazanonacos-1-yl]-4-hydroxy-2-pyrrolidinyl)methyl ester
aaagttggcagttatggtttt

SEQ ID NO: 1892 - RNA, 21 nt, synthetic construct
  source 1..21: mol_type = other RNA
  modified_base 1: mod_base = OTHER; note = 2'-O-methyluridine-3'-phosphorothioate
  modified_base 2: mod_base = OTHER; note = 2'-O-methylguanosine-3'-phosphorothioate
  modified_base 3: mod_base = OTHER; note = 2'-O-methylguanosine-3'-phosphate
  modified_base 4: mod_base = OTHER; note = 2'-O-methylcytidine-3'-phosphate
  modified_base 5: mod_base = OTHER; note = 2'-O-methyladenosine-3'-phosphate
  modified_base 6: mod_base = OTHER; note = 2'-O-methylguanosine-3'-phosphate
  modified_base 7: mod_base = OTHER; note = 2'-deoxy-2'-fluorouridine-3'-phosphate
  modified_base 8: mod_base = OTHER; note = 2'-O-methyluridine-3'-phosphate
  modified_base 9: mod_base = OTHER; note = 2'-deoxy-2'-fluoroadenosine-3'-phosphate
  modified_base 10: mod_base = OTHER; note = 2'-deoxy-2'-fluorouridine-3'-phosphate
  modified_base 11: mod_base = OTHER; note = 2'-deoxy-2'-fluoroguanosine-3'-phosphate
  modified_base 12: mod_base = OTHER; note = 2'-O-methylguanosine-3'-phosphate
  modified_base 13: mod_base = OTHER; note = 2'-O-methyluridine-3'-phosphate
  modified_base 14: mod_base = OTHER; note = 2'-O-methyluridine-3'-phosphate
  modified_base 15: mod_base = OTHER; note = 2'-O-methyluridine-3'-phosphate
  modified_base 16: mod_base = OTHER; note = 2'-O-methyluridine-3'-phosphate
  modified_base 17: mod_base = OTHER; note = 2'-O-methylcytidine-3'-phosphate
  modified_base 18: mod_base = OTHER; note = 2'-O-methyluridine-3'-phosphate
  modified_base 19: mod_base = OTHER; note = 2'-O-methyluridine-3'-phosphate
  modified_base 20: mod_base = OTHER; note = 2'-O-methyluridine-3'-phosphate
  modified_base 21: mod_base = OTHER; note = 2'-O-methyluridine-3'-phosphate ((2S,4R)-1-[29-[[2-(acetylamino)-2-deoxy-beta-D-galactopyra nosyl]oxy]-14,14-bis[[3-[[3-[[5-[[2-(acetylamino)-2-deoxy-b eta-D-galactopyranosyl]oxy]-1-oxopentyl]amino]propyl]amino] -3-oxopropoxy]methyl]-1,12,19,25-tetraoxo-16-oxa-13,20,24-t riazanonacos-1-yl]-4-hydroxy-2-pyrrolidinyl)methyl ester
tggcagttatggttttctttt

SEQ ID NO: 1893 - RNA, 21 nt, synthetic construct
  source 1..21: mol_type = other RNA
  modified_base 1: mod_base = OTHER; note = 2'-O-methylguanosine-3'-phosphorothioate
  modified_base 2: mod_base = OTHER; note = 2'-O-methyluridine-3'-phosphorothioate
  modified_base 3: mod_base = OTHER; note = 2'-O-methyluridine-3'-phosphate
  modified_base 4: mod_base = OTHER; note = 2'-O-methyladenosine-3'-phosphate
  modified_base 5: mod_base = OTHER; note = 2'-O-methyluridine-3'-phosphate
  modified_base 6: mod_base = OTHER; note = 2'-O-methylguanosine-3'-phosphate
  modified_base 7: mod_base = OTHER; note = 2'-deoxy-2'-fluoroguanosine-3'-phosphate
  modified_base 8: mod_base = OTHER; note = 2'-O-methyluridine-3'-phosphate
  modified_base 9: mod_base = OTHER; note = 2'-deoxy-2'-fluorouridine-3'-phosphate
  modified_base 10: mod_base = OTHER; note = 2'-deoxy-2'-fluorouridine-3'-phosphate
  modified_base 11: mod_base = OTHER; note = 2'-deoxy-2'-fluorouridine-3'-phosphate
  modified_base 12: mod_base = OTHER; note = 2'-O-methylcytidine-3'-phosphate
  modified_base 13: mod_base = OTHER; note = 2'-O-methyluridine-3'-phosphate
  modified_base 14: mod_base = OTHER; note = 2'-O-methyluridine-3'-phosphate
  modified_base 15: mod_base = OTHER; note = 2'-O-methyluridine-3'-phosphate
  modified_base 16: mod_base = OTHER; note = 2'-O-methylcytidine-3'-phosphate
  modified_base 17: mod_base = OTHER; note = 2'-O-methyladenosine-3'-phosphate
  modified_base 18: mod_base = OTHER; note = 2'-O-methyluridine-3'-phosphate
  modified_base 19: mod_base = OTHER; note = 2'-O-methylcytidine-3'-phosphate
  modified_base 20: mod_base = OTHER; note = 2'-O-methyluridine-3'-phosphate
  modified_base 21: mod_base = OTHER; note = 2'-O-methyluridine-3'-phosphate ((2S,4R)-1-[29-[[2-(acetylamino)-2-deoxy-beta-D-galactopyra nosyl]oxy]-14,14-bis[[3-[[3-[[5-[[2-(acetylamino)-2-deoxy-b eta-D-galactopyranosyl]oxy]-1-oxopentyl]amino]propyl]amino] -3-oxopropoxy]methyl]-1,12,19,25-tetraoxo-16-oxa-13,20,24-t riazanonacos-1-yl]-4-hydroxy-2-pyrrolidinyl)methyl ester
gttatggttttctttcatctt

SEQ ID NO: 1894 - RNA, 21 nt, synthetic construct
  source 1..21: mol_type = other RNA
  modified_base 1: mod_base = OTHER; note = 2'-O-methyluridine-3'-phosphorothioate
  modified_base 2: mod_base = OTHER; note = 2'-O-methyluridine-3'-phosphorothioate
  modified_base 3: mod_base = OTHER; note = 2'-O-methylcytidine-3'-phosphate
  modified_base 4: mod_base = OTHER; note = 2'-O-methyluridine-3'-phosphate
  modified_base 5: mod_base = OTHER; note = 2'-O-methyluridine-3'-phosphate
  modified_base 6: mod_base = OTHER; note = 2'-O-methyluridine-3'-phosphate
  modified_base 7: mod_base = OTHER; note = 2'-deoxy-2'-fluorocytidine-3'-phosphate
  modified_base 8: mod_base = OTHER; note = 2'-O-methyladenosine-3'-phosphate
  modified_base 9: mod_base = OTHER; note = 2'-deoxy-2'-fluorouridine-3'-phosphate
  modified_base 10: mod_base = OTHER; note = 2'-deoxy-2'-fluorocytidine-3'-phosphate
  modified_base 11: mod_base = OTHER; note = 2'-deoxy-2'-fluorouridine-3'-phosphate
  modified_base 12: mod_base = OTHER; note = 2'-O-methylguanosine-3'-phosphate
  modified_base 13: mod_base = OTHER; note = 2'-O-methyladenosine-3'-phosphate
  modified_base 14: mod_base = OTHER; note = 2'-O-methyluridine-3'-phosphate
  modified_base 15: mod_base = OTHER; note = 2'-O-methylguanosine-3'-phosphate
  modified_base 16: mod_base = OTHER; note = 2'-O-methyluridine-3'-phosphate
  modified_base 17: mod_base = OTHER; note = 2'-O-methylguanosine-3'-phosphate
  modified_base 18: mod_base = OTHER; note = 2'-O-methyluridine-3'-phosphate
  modified_base 19: mod_base = OTHER; note = 2'-O-methylcytidine-3'-phosphate
  modified_base 20: mod_base = OTHER; note = 2'-O-methyladenosine-3'-phosphate
  modified_base 21: mod_base = OTHER; note = 2'-O-methyluridine-3'-phosphate ((2S,4R)-1-[29-[[2-(acetylamino)-2-deoxy-beta-D-galactopyra nosyl]oxy]-14,14-bis[[3-[[3-[[5-[[2-(acetylamino)-2-deoxy-b eta-D-galactopyranosyl]oxy]-1-oxopentyl]amino]propyl]amino] -3-oxopropoxy]methyl]-1,12,19,25-tetraoxo-16-oxa-13,20,24-t riazanonacos-1-yl]-4-hydroxy-2-pyrrolidinyl)methyl ester
ttctttcatctgatgtgtcat

SEQ ID NO: 1895 - RNA, 21 nt, synthetic construct
  source 1..21: mol_type = other RNA
  modified_base 1: mod_base = OTHER; note = 2'-O-methylcytidine-3'-phosphorothioate
  modified_base 2: mod_base = OTHER; note = 2'-O-methyladenosine-3'-phosphorothioate
  modified_base 3: mod_base = OTHER; note = 2'-O-methyluridine-3'-phosphate
  modified_base 4: mod_base = OTHER; note = 2'-O-methylcytidine-3'-phosphate
  modified_base 5: mod_base = OTHER; note = 2'-O-methyluridine-3'-phosphate
  modified_base 6: mod_base = OTHER; note = 2'-O-methylguanosine-3'-phosphate
  modified_base 7: mod_base = OTHER; note = 2'-deoxy-2'-fluoroadenosine-3'-phosphate
  modified_base 8: mod_base = OTHER; note = 2'-O-methyluridine-3'-phosphate
  modified_base 9: mod_base = OTHER; note = 2'-deoxy-2'-fluoroguanosine-3'-phosphate
  modified_base 10: mod_base = OTHER; note = 2'-deoxy-2'-fluorouridine-3'-phosphate
  modified_base 11: mod_base = OTHER; note = 2'-deoxy-2'-fluoroguanosine-3'-phosphate
  modified_base 12: mod_base = OTHER; note = 2'-O-methyluridine-3'-phosphate
  modified_base 13: mod_base = OTHER; note = 2'-O-methylcytidine-3'-phosphate
  modified_base 14: mod_base = OTHER; note = 2'-O-methyladenosine-3'-phosphate
  modified_base 15: mod_base = OTHER; note = 2'-O-methylguanosine-3'-phosphate
  modified_base 16: mod_base = OTHER; note = 2'-O-methyluridine-3'-phosphate
  modified_base 17: mod_base = OTHER; note = 2'-O-methyladenosine-3'-phosphate
  modified_base 18: mod_base = OTHER; note = 2'-O-methyluridine-3'-phosphate
  modified_base 19: mod_base = OTHER; note = 2'-O-methylcytidine-3'-phosphate
  modified_base 20: mod_base = OTHER; note = 2'-O-methyluridine-3'-phosphate
  modified_base 21: mod_base = OTHER; note = 2'-O-methyluridine-3'-phosphate ((2S,4R)-1-[29-[[2-(acetylamino)-2-deoxy-beta-D-galactopyra nosyl]oxy]-14,14-bis[[3-[[3-[[5-[[2-(acetylamino)-2-deoxy-b eta-D-galactopyranosyl]oxy]-1-oxopentyl]amino]propyl]amino] -3-oxopropoxy]methyl]-1,12,19,25-tetraoxo-16-oxa-13,20,24-t riazanonacos-1-yl]-4-hydroxy-2-pyrrolidinyl)methyl ester
catctgatgtgtcagtatctt

SEQ ID NO: 1896 - RNA, 21 nt, synthetic construct
  source 1..21: mol_type = other RNA
  modified_base 1: mod_base = OTHER; note = 2'-O-methyladenosine-3'-phosphorothioate
  modified_base 2: mod_base = OTHER; note = 2'-O-methyluridine-3'-phosphorothioate
  modified_base 3: mod_base = OTHER; note = 2'-O-methylguanosine-3'-phosphate
  modified_base 4: mod_base = OTHER; note = 2'-O-methyluridine-3'-phosphate
  modified_base 5: mod_base = OTHER; note = 2'-O-methylguanosine-3'-phosphate
  modified_base 6: mod_base = OTHER; note = 2'-O-methyluridine-3'-phosphate
  modified_base 7: mod_base = OTHER; note = 2'-deoxy-2'-fluorocytidine-3'-phosphate
  modified_base 8: mod_base = OTHER; note = 2'-O-methyladenosine-3'-phosphate
  modified_base 9: mod_base = OTHER; note = 2'-deoxy-2'-fluoroguanosine-3'-phosphate
  modified_base 10: mod_base = OTHER; note = 2'-deoxy-2'-fluorouridine-3'-phosphate
  modified_base 11: mod_base = OTHER; note = 2'-deoxy-2'-fluoroadenosine-3'-phosphate
  modified_base 12: mod_base = OTHER; note = 2'-O-methyluridine-3'-phosphate
  modified_base 13: mod_base = OTHER; note = 2'-O-methylcytidine-3'-phosphate
  modified_base 14: mod_base = OTHER; note = 2'-O-methyluridine-3'-phosphate
  modified_base 15: mod_base = OTHER; note = 2'-O-methylguanosine-3'-phosphate
  modified_base 16: mod_base = OTHER; note = 2'-O-methyluridine-3'-phosphate
  modified_base 17: mod_base = OTHER; note = 2'-O-methyluridine-3'-phosphate
  modified_base 18: mod_base = OTHER; note = 2'-O-methylguanosine-3'-phosphate
  modified_base 19: mod_base = OTHER; note = 2'-O-methyladenosine-3'-phosphate
  modified_base 20: mod_base = OTHER; note = 2'-O-methyluridine-3'-phosphate
  modified_base 21: mod_base = OTHER; note = 2'-O-methyluridine-3'-phosphate ((2S,4R)-1-[29-[[2-(acetylamino)-2-deoxy-beta-D-galactopyra nosyl]oxy]-14,14-bis[[3-[[3-[[5-[[2-(acetylamino)-2-deoxy-b eta-D-galactopyranosyl]oxy]-1-oxopentyl]amino]propyl]amino] -3-oxopropoxy]methyl]-1,12,19,25-tetraoxo-16-oxa-13,20,24-t riazanonacos-1-yl]-4-hydroxy-2-pyrrolidinyl)methyl ester
atgtgtcagtatctgttgatt

SEQ ID NO: 1897 - RNA, 21 nt, synthetic construct
  source 1..21: mol_type = other RNA
  modified_base 1: mod_base = OTHER; note = 2'-O-methylcytidine-3'-phosphorothioate
  modified_base 2: mod_base = OTHER; note = 2'-O-methyladenosine-3'-phosphorothioate
  modified_base 3: mod_base = OTHER; note = 2'-O-methylguanosine-3'-phosphate
  modified_base 4: mod_base = OTHER; note = 2'-O-methyluridine-3'-phosphate
  modified_base 5: mod_base = OTHER; note = 2'-O-methyladenosine-3'-phosphate
  modified_base 6: mod_base = OTHER; note = 2'-O-methyluridine-3'-phosphate
  modified_base 7: mod_base = OTHER; note = 2'-deoxy-2'-fluorocytidine-3'-phosphate
  modified_base 8: mod_base = OTHER; note = 2'-O-methyluridine-3'-phosphate
  modified_base 9: mod_base = OTHER; note = 2'-deoxy-2'-fluoroguanosine-3'-phosphate
  modified_base 10: mod_base = OTHER; note = 2'-deoxy-2'-fluorouridine-3'-phosphate
  modified_base 11: mod_base = OTHER; note = 2'-deoxy-2'-fluorouridine-3'-phosphate
  modified_base 12: mod_base = OTHER; note = 2'-O-methylguanosine-3'-phosphate
  modified_base 13: mod_base = OTHER; note = 2'-O-methyladenosine-3'-phosphate
  modified_base 14: mod_base = OTHER; note = 2'-O-methyluridine-3'-phosphate
  modified_base 15: mod_base = OTHER; note = 2'-O-methyluridine-3'-phosphate
  modified_base 16: mod_base = OTHER; note = 2'-O-methyluridine-3'-phosphate
  modified_base 17: mod_base = OTHER; note = 2'-O-methylguanosine-3'-phosphate
  modified_base 18: mod_base = OTHER; note = 2'-O-methylcytidine-3'-phosphate
  modified_base 19: mod_base = OTHER; note = 2'-O-methyluridine-3'-phosphate
  modified_base 20: mod_base = OTHER; note = 2'-O-methyluridine-3'-phosphate
  modified_base 21: mod_base = OTHER; note = 2'-O-methyluridine-3'-phosphate ((2S,4R)-1-[29-[[2-(acetylamino)-2-deoxy-beta-D-galactopyra nosyl]oxy]-14,14-bis[[3-[[3-[[5-[[2-(acetylamino)-2-deoxy-b eta-D-galactopyranosyl]oxy]-1-oxopentyl]amino]propyl]amino] -3-oxopropoxy]methyl]-1,12,19,25-tetraoxo-16-oxa-13,20,24-t riazanonacos-1-yl]-4-hydroxy-2-pyrrolidinyl)methyl ester
cagtatctgttgatttgcttt

SEQ ID NO: 1898 - RNA, 21 nt, synthetic construct
  source 1..21: mol_type = other RNA
  modified_base 1: mod_base = OTHER; note = 2'-O-methylguanosine-3'-phosphorothioate
  modified_base 2: mod_base = OTHER; note = 2'-O-methyluridine-3'-phosphorothioate
  modified_base 3: mod_base = OTHER; note = 2'-O-methyluridine-3'-phosphate
  modified_base 4: mod_base = OTHER; note = 2'-O-methylguanosine-3'-phosphate
  modified_base 5: mod_base = OTHER; note = 2'-O-methyladenosine-3'-phosphate
  modified_base 6: mod_base = OTHER; note = 2'-O-methyluridine-3'-phosphate
  modified_base 7: mod_base = OTHER; note = 2'-deoxy-2'-fluorouridine-3'-phosphate
  modified_base 8: mod_base = OTHER; note = 2'-O-methyluridine-3'-phosphate
  modified_base 9: mod_base = OTHER; note = 2'-deoxy-2'-fluoroguanosine-3'-phosphate
  modified_base 10: mod_base = OTHER; note = 2'-deoxy-2'-fluorocytidine-3'-phosphate
  modified_base 11: mod_base = OTHER; note = 2'-deoxy-2'-fluorouridine-3'-phosphate
  modified_base 12: mod_base = OTHER; note = 2'-O-methyluridine-3'-phosphate
  modified_base 13: mod_base = OTHER; note = 2'-O-methyluridine-3'-phosphate
  modified_base 14: mod_base = OTHER; note = 2'-O-methylguanosine-3'-phosphate
  modified_base 15: mod_base = OTHER; note = 2'-O-methyluridine-3'-phosphate
  modified_base 16: mod_base = OTHER; note = 2'-O-methyladenosine-3'-phosphate
  modified_base 17: mod_base = OTHER; note = 2'-O-methylguanosine-3'-phosphate
  modified_base 18: mod_base = OTHER; note = 2'-O-methyluridine-3'-phosphate
  modified_base 19: mod_base = OTHER; note = 2'-O-methyluridine-3'-phosphate
  modified_base 20: mod_base = OTHER; note = 2'-O-methyluridine-3'-phosphate
  modified_base 21: mod_base = OTHER; note = 2'-O-methyluridine-3'-phosphate ((2S,4R)-1-[29-[[2-(acetylamino)-2-deoxy-beta-D-galactopyra nosyl]oxy]-14,14-bis[[3-[[3-[[5-[[2-(acetylamino)-2-deoxy-b eta-D-galactopyranosyl]oxy]-1-oxopentyl]amino]propyl]amino] -3-oxopropoxy]methyl]-1,12,19,25-tetraoxo-16-oxa-13,20,24-t riazanonacos-1-yl]-4-hydroxy-2-pyrrolidinyl)methyl ester
gttgatttgctttgtagtttt

SEQ ID NO: 1899 - RNA, 21 nt, synthetic construct
  source 1..21: mol_type = other RNA
  modified_base 1: mod_base = OTHER; note = 2'-O-methylguanosine-3'-phosphorothioate
  modified_base 2: mod_base = OTHER; note = 2'-O-methylcytidine-3'-phosphorothioate
  modified_base 3: mod_base = OTHER; note = 2'-O-methyluridine-3'-phosphate
  modified_base 4: mod_base = OTHER; note = 2'-O-methyluridine-3'-phosphate
  modified_base 5: mod_base = OTHER; note = 2'-O-methyluridine-3'-phosphate
  modified_base 6: mod_base = OTHER; note = 2'-O-methylguanosine-3'-phosphate
  modified_base 7: mod_base = OTHER; note = 2'-deoxy-2'-fluorouridine-3'-phosphate
  modified_base 8: mod_base = OTHER; note = 2'-O-methyladenosine-3'-phosphate
  modified_base 9: mod_base = OTHER; note = 2'-deoxy-2'-fluoroguanosine-3'-phosphate
  modified_base 10: mod_base = OTHER; note = 2'-deoxy-2'-fluorouridine-3'-phosphate
  modified_base 11: mod_base = OTHER; note = 2'-deoxy-2'-fluorouridine-3'-phosphate
  modified_base 12: mod_base = OTHER; note = 2'-O-methyluridine-3'-phosphate
  modified_base 13: mod_base = OTHER; note = 2'-O-methylguanosine-3'-phosphate
  modified_base 14: mod_base = OTHER; note = 2'-O-methyluridine-3'-phosphate
  modified_base 15: mod_base = OTHER; note = 2'-O-methyluridine-3'-phosphate
  modified_base 16: mod_base = OTHER; note = 2'-O-methylguanosine-3'-phosphate
  modified_base 17: mod_base = OTHER; note = 2'-O-methyladenosine-3'-phosphate
  modified_base 18: mod_base = OTHER; note = 2'-O-methylcytidine-3'-phosphate
  modified_base 19: mod_base = OTHER; note = 2'-O-methyladenosine-3'-phosphate
  modified_base 20: mod_base = OTHER; note = 2'-O-methyluridine-3'-phosphate
  modified_base 21: mod_base = OTHER; note = 2'-O-methyluridine-3'-phosphate ((2S,4R)-1-[29-[[2-(acetylamino)-2-deoxy-beta-D-galactopyra nosyl]oxy]-14,14-bis[[3-[[3-[[5-[[2-(acetylamino)-2-deoxy-b eta-D-galactopyranosyl]oxy]-1-oxopentyl]amino]propyl]amino] -3-oxopropoxy]methyl]-1,12,19,25-tetraoxo-16-oxa-13,20,24-t riazanonacos-1-yl]-4-hydroxy-2-pyrrolidinyl)methyl ester
gctttgtagtttgttgacatt

SEQ ID NO: 1900 - RNA, 21 nt, synthetic construct
  source 1..21: mol_type = other RNA
  modified_base 1: mod_base = OTHER; note = 2'-O-methylguanosine-3'-phosphorothioate
  modified_base 2: mod_base = OTHER; note = 2'-O-methyluridine-3'-phosphorothioate
  modified_base 3: mod_base = OTHER; note = 2'-O-methyladenosine-3'-phosphate
  modified_base 4: mod_base = OTHER; note = 2'-O-methylguanosine-3'-phosphate
  modified_base 5: mod_base = OTHER; note = 2'-O-methyluridine-3'-phosphate
  modified_base 6: mod_base = OTHER; note = 2'-O-methyluridine-3'-phosphate
  modified_base 7: mod_base = OTHER; note = 2'-deoxy-2'-fluorouridine-3'-phosphate
  modified_base 8: mod_base = OTHER; note = 2'-O-methylguanosine-3'-phosphate
  modified_base 9: mod_base = OTHER; note = 2'-deoxy-2'-fluorouridine-3'-phosphate
  modified_base 10: mod_base = OTHER; note = 2'-deoxy-2'-fluorouridine-3'-phosphate
  modified_base 11: mod_base = OTHER; note = 2'-deoxy-2'-fluoroguanosine-3'-phosphate
  modified_base 12: mod_base = OTHER; note = 2'-O-methyladenosine-3'-phosphate
  modified_base 13: mod_base = OTHER; note = 2'-O-methylcytidine-3'-phosphate
  modified_base 14: mod_base = OTHER; note = 2'-O-methyladenosine-3'-phosphate
  modified_base 15: mod_base = OTHER; note = 2'-O-methyluridine-3'-phosphate
  modified_base 16: mod_base = OTHER; note = 2'-O-methylcytidine-3'-phosphate
  modified_base 17: mod_base = OTHER; note = 2'-O-methyluridine-3'-phosphate
  modified_base 18: mod_base = OTHER; note = 2'-O-methyluridine-3'-phosphate
  modified_base 19: mod_base = OTHER; note = 2'-O-methyladenosine-3'-phosphate
  modified_base 20: mod_base = OTHER; note = 2'-O-methyladenosine-3'-phosphate
  modified_base 21: mod_base = OTHER; note = 2'-O-methyluridine-3'-phosphate ((2S,4R)-1-[29-[[2-(acetylamino)-2-deoxy-beta-D-galactopyra nosyl]oxy]-14,14-bis[[3-[[3-[[5-[[2-(acetylamino)-2-deoxy-b eta-D-galactopyranosyl]oxy]-1-oxopentyl]amino]propyl]amino] -3-oxopropoxy]methyl]-1,12,19,25-tetraoxo-16-oxa-13,20,24-t riazanonacos-1-yl]-4-hydroxy-2-pyrrolidinyl)methyl ester
gtagtttgttgacatcttaat

SEQ ID NO: 1901 - RNA, 21 nt, synthetic construct
  source 1..21: mol_type = other RNA
  modified_base 1: mod_base = OTHER; note = 2'-O-methyluridine-3'-phosphorothioate
  modified_base 2: mod_base = OTHER; note = 2'-O-methyluridine-3'-phosphorothioate
  modified_base 3: mod_base = OTHER; note = 2'-O-methylguanosine-3'-phosphate
  modified_base 4: mod_base = OTHER; note = 2'-O-methyluridine-3'-phosphate
  modified_base 5: mod_base = OTHER; note = 2'-O-methyluridine-3'-phosphate
  modified_base 6: mod_base = OTHER; note = 2'-O-methylguanosine-3'-phosphate
  modified_base 7: mod_base = OTHER; note = 2'-deoxy-2'-fluoroadenosine-3'-phosphate
  modified_base 8: mod_base = OTHER; note = 2'-O-methylcytidine-3'-phosphate
  modified_base 9: mod_base = OTHER; note = 2'-deoxy-2'-fluoroadenosine-3'-phosphate
  modified_base 10: mod_base = OTHER; note = 2'-deoxy-2'-fluorouridine-3'-phosphate
  modified_base 11: mod_base = OTHER; note = 2'-deoxy-2'-fluorocytidine-3'-phosphate
  modified_base 12: mod_base = OTHER; note = 2'-O-methyluridine-3'-phosphate
  modified_base 13: mod_base = OTHER; note = 2'-O-methyluridine-3'-phosphate
  modified_base 14: mod_base = OTHER; note = 2'-O-methyladenosine-3'-phosphate
  modified_base 15: mod_base = OTHER; note = 2'-O-methyladenosine-3'-phosphate
  modified_base 16: mod_base = OTHER; note = 2'-O-methylguanosine-3'-phosphate
  modified_base 17: mod_base = OTHER; note = 2'-O-methyladenosine-3'-phosphate
  modified_base 18: mod_base = OTHER; note = 2'-O-methyluridine-3'-phosphate
  modified_base 19: mod_base = OTHER; note = 2'-O-methyluridine-3'-phosphate
  modified_base 20: mod_base = OTHER; note = 2'-O-methyluridine-3'-phosphate
  modified_base 21: mod_base = OTHER; note = 2'-O-methyluridine-3'-phosphate ((2S,4R)-1-[29-[[2-(acetylamino)-2-deoxy-beta-D-galactopyra nosyl]oxy]-14,14-bis[[3-[[3-[[5-[[2-(acetylamino)-2-deoxy-b eta-D-galactopyranosyl]oxy]-1-oxopentyl]amino]propyl]amino] -3-oxopropoxy]methyl]-1,12,19,25-tetraoxo-16-oxa-13,20,24-t riazanonacos-1-yl]-4-hydroxy-2-pyrrolidinyl)methyl ester
ttgttgacatcttaagatttt

SEQ ID NO: 1902 - RNA, 21 nt, synthetic construct
  source 1..21: mol_type = other RNA
  modified_base 1: mod_base = OTHER; note = 2'-O-methylguanosine-3'-phosphorothioate
  modified_base 2: mod_base = OTHER; note = 2'-O-methyladenosine-3'-phosphorothioate
  modified_base 3: mod_base = OTHER; note = 2'-O-methylcytidine-3'-phosphate
  modified_base 4: mod_base = OTHER; note = 2'-O-methyladenosine-3'-phosphate
  modified_base 5: mod_base = OTHER; note = 2'-O-methyluridine-3'-phosphate
  modified_base 6: mod_base = OTHER; note = 2'-O-methylcytidine-3'-phosphate
  modified_base 7: mod_base = OTHER; note = 2'-deoxy-2'-fluorouridine-3'-phosphate
  modified_base 8: mod_base = OTHER; note = 2'-O-methyluridine-3'-phosphate
  modified_base 9: mod_base = OTHER; note = 2'-deoxy-2'-fluoroadenosine-3'-phosphate
  modified_base 10: mod_base = OTHER; note = 2'-deoxy-2'-fluoroadenosine-3'-phosphate
  modified_base 11: mod_base = OTHER; note = 2'-deoxy-2'-fluoroguanosine-3'-phosphate
  modified_base 12: mod_base = OTHER; note = 2'-O-methyladenosine-3'-phosphate
  modified_base 13: mod_base = OTHER; note = 2'-O-methyluridine-3'-phosphate
  modified_base 14: mod_base = OTHER; note = 2'-O-methyluridine-3'-phosphate
  modified_base 15: mod_base = OTHER; note = 2'-O-methyluridine-3'-phosphate
  modified_base 16: mod_base = OTHER; note = 2'-O-methylguanosine-3'-phosphate
  modified_base 17: mod_base = OTHER; note = 2'-O-methyladenosine-3'-phosphate
  modified_base 18: mod_base = OTHER; note = 2'-O-methyluridine-3'-phosphate
  modified_base 19: mod_base = OTHER; note = 2'-O-methylguanosine-3'-phosphate
  modified_base 20: mod_base = OTHER; note = 2'-O-methyluridine-3'-phosphate
  modified_base 21: mod_base = OTHER; note = 2'-O-methyluridine-3'-phosphate ((2S,4R)-1-[29-[[2-(acetylamino)-2-deoxy-beta-D-galactopyra nosyl]oxy]-14,14-bis[[3-[[3-[[5-[[2-(acetylamino)-2-deoxy-b eta-D-galactopyranosyl]oxy]-1-oxopentyl]amino]propyl]amino] -3-oxopropoxy]methyl]-1,12,19,25-tetraoxo-16-oxa-13,20,24-t riazanonacos-1-yl]-4-hydroxy-2-pyrrolidinyl)methyl ester
gacatcttaagatttgatgtt

SEQ ID NO: 1903 - RNA, 21 nt, synthetic construct
  source 1..21: mol_type = other RNA
  modified_base 1: mod_base = OTHER; note = 2'-O-methyluridine-3'-phosphorothioate
  modified_base 2: mod_base = OTHER; note = 2'-O-methyluridine-3'-phosphorothioate
  modified_base 3: mod_base = OTHER; note = 2'-O-methyladenosine-3'-phosphate
  modified_base 4: mod_base = OTHER; note = 2'-O-methyladenosine-3'-phosphate
  modified_base 5: mod_base = OTHER; note = 2'-O-methylguanosine-3'-phosphate
  modified_base 6: mod_base = OTHER; note = 2'-O-methyladenosine-3'-phosphate
  modified_base 7: mod_base = OTHER; note = 2'-deoxy-2'-fluorouridine-3'-phosphate
  modified_base 8: mod_base = OTHER; note = 2'-O-methyluridine-3'-phosphate
  modified_base 9: mod_base = OTHER; note = 2'-deoxy-2'-fluorouridine-3'-phosphate
  modified_base 10: mod_base = OTHER; note = 2'-deoxy-2'-fluoroguanosine-3'-phosphate
  modified_base 11: mod_base = OTHER; note = 2'-deoxy-2'-fluoroadenosine-3'-phosphate
  modified_base 12: mod_base = OTHER; note = 2'-O-methyluridine-3'-phosphate
  modified_base 13: mod_base = OTHER; note = 2'-O-methylguanosine-3'-phosphate
  modified_base 14: mod_base = OTHER; note = 2'-O-methyluridine-3'-phosphate
  modified_base 15: mod_base = OTHER; note = 2'-O-methylguanosine-3'-phosphate
  modified_base 16: mod_base = OTHER; note = 2'-O-methyladenosine-3'-phosphate
  modified_base 17: mod_base = OTHER; note = 2'-O-methyladenosine-3'-phosphate
  modified_base 18: mod_base = OTHER; note = 2'-O-methyladenosine-3'-phosphate
  modified_base 19: mod_base = OTHER; note = 2'-O-methylguanosine-3'-phosphate
  modified_base 20: mod_base = OTHER; note = 2'-O-methyluridine-3'-phosphate
  modified_base 21: mod_base = OTHER; note = 2'-O-methyluridine-3'-phosphate ((2S,4R)-1-[29-[[2-(acetylamino)-2-deoxy-beta-D-galactopyra nosyl]oxy]-14,14-bis[[3-[[3-[[5-[[2-(acetylamino)-2-deoxy-b eta-D-galactopyranosyl]oxy]-1-oxopentyl]amino]propyl]amino] -3-oxopropoxy]methyl]-1,12,19,25-tetraoxo-16-oxa-13,20,24-t riazanonacos-1-yl]-4-hydroxy-2-pyrrolidinyl)methyl ester
ttaagatttgatgtgaaagtt

SEQ ID NO: 1904 - RNA, 21 nt, synthetic construct
  source 1..21: mol_type = other RNA
  modified_base 1: mod_base = OTHER; note = 2'-O-methyluridine-3'-phosphorothioate
  modified_base 2: mod_base = OTHER; note = 2'-O-methyluridine-3'-phosphorothioate
  modified_base 3: mod_base = OTHER; note = 2'-O-methyluridine-3'-phosphate
  modified_base 4: mod_base = OTHER; note = 2'-O-methylguanosine-3'-phosphate
  modified_base 5: mod_base = OTHER; note = 2'-O-methyladenosine-3'-phosphate
  modified_base 6: mod_base = OTHER; note = 2'-O-methyluridine-3'-phosphate
  modified_base 7: mod_base = OTHER; note = 2'-deoxy-2'-fluoroguanosine-3'-phosphate
  modified_base 8: mod_base = OTHER; note = 2'-O-methyluridine-3'-phosphate
  modified_base 9: mod_base = OTHER; note = 2'-deoxy-2'-fluoroguanosine-3'-phosphate
  modified_base 10: mod_base = OTHER; note = 2'-deoxy-2'-fluoroadenosine-3'-phosphate
  modified_base 11: mod_base = OTHER; note = 2'-deoxy-2'-fluoroadenosine-3'-phosphate
  modified_base 12: mod_base = OTHER; note = 2'-O-methyladenosine-3'-phosphate
  modified_base 13: mod_base = OTHER; note = 2'-O-methylguanosine-3'-phosphate
  modified_base 14: mod_base = OTHER; note = 2'-O-methyluridine-3'-phosphate
  modified_base 15: mod_base = OTHER; note = 2'-O-methyluridine-3'-phosphate
  modified_base 16: mod_base = OTHER; note = 2'-O-methyluridine-3'-phosphate
  modified_base 17: mod_base = OTHER; note = 2'-O-methyluridine-3'-phosphate
  modified_base 18: mod_base = OTHER; note = 2'-O-methyladenosine-3'-phosphate
  modified_base 19: mod_base = OTHER; note = 2'-O-methylguanosine-3'-phosphate
  modified_base 20: mod_base = OTHER; note = 2'-O-methyladenosine-3'-phosphate
  modified_base 21: mod_base = OTHER; note = 2'-O-methyluridine-3'-phosphate ((2S,4R)-1-[29-[[2-(acetylamino)-2-deoxy-beta-D-galactopyra nosyl]oxy]-14,14-bis[[3-[[3-[[5-[[2-(acetylamino)-2-deoxy-b eta-D-galactopyranosyl]oxy]-1-oxopentyl]amino]propyl]amino] -3-oxopropoxy]methyl]-1,12,19,25-tetraoxo-16-oxa-13,20,24-t riazanonacos-1-yl]-4-hydroxy-2-pyrrolidinyl)methyl ester
tttgatgtgaaagttttagat

SEQ ID NO: 1905 - RNA, 21 nt, synthetic construct
  source 1..21: mol_type = other RNA
  modified_base 1: mod_base = OTHER; note = 2'-O-methyladenosine-3'-phosphorothioate
  modified_base 2: mod_base = OTHER; note = 2'-O-methyluridine-3'-phosphorothioate
  modified_base 3: mod_base = OTHER; note = 2'-O-methylguanosine-3'-phosphate
  modified_base 4: mod_base = OTHER; note = 2'-O-methylguanosine-3'-phosphate
  modified_base 5: mod_base = OTHER; note = 2'-O-methylcytidine-3'-phosphate
  modified_base 6: mod_base = OTHER; note = 2'-O-hexadecyl-guanosine-3'-phosphate
  modified_base 7: mod_base = OTHER; note = 2'-deoxy-2'-fluoroadenosine-3'-phosphate
  modified_base 8: mod_base = OTHER; note = 2'-O-methyluridine-3'-phosphate
  modified_base 9: mod_base = OTHER; note = 2'-deoxy-2'-fluoroguanosine-3'-phosphate
  modified_base 10: mod_base = OTHER; note = 2'-deoxy-2'-fluoroadenosine-3'-phosphate
  modified_base 11: mod_base = OTHER; note = 2'-deoxy-2'-fluorouridine-3'-phosphate
  modified_base 12: mod_base = OTHER; note = 2'-O-methylguanosine-3'-phosphate
  modified_base 13: mod_base = OTHER; note = 2'-O-methylcytidine-3'-phosphate
  modified_base 14: mod_base = OTHER; note = 2'-O-methylcytidine-3'-phosphate
  modified_base 15: mod_base = OTHER; note = 2'-O-methyluridine-3'-phosphate
  modified_base 16: mod_base = OTHER; note = 2'-O-methylcytidine-3'-phosphate
  modified_base 17: mod_base = OTHER; note = 2'-O-methyluridine-3'-phosphate
  modified_base 18: mod_base = OTHER; note = 2'-O-methyladenosine-3'-phosphate
  modified_base 19: mod_base = OTHER; note = 2'-O-methylguanosine-3'-phosphorothioate
  modified_base 20: mod_base = OTHER; note = 2'-O-methyluridine-3'-phosphorothioate
  modified_base 21: mod_base = OTHER; note = 2'-O-methyladenosine
atggcgatgatgcctctagta

SEQ ID NO: 1906 - RNA, 21 nt, synthetic construct
  source 1..21: mol_type = other RNA
  modified_base 1: mod_base = OTHER; note = 2'-O-methyluridine-3'-phosphorothioate
  modified_base 2: mod_base = OTHER; note = 2'-O-methylguanosine-3'-phosphorothioate
  modified_base 3: mod_base = OTHER; note = 2'-O-methyladenosine-3'-phosphate
  modified_base 4: mod_base = OTHER; note = 2'-O-methyluridine-3'-phosphate
  modified_base 5: mod_base = OTHER; note = 2'-O-methylguanosine-3'-phosphate
  modified_base 6: mod_base = OTHER; note = 2'-O-hexadecyl-cytidine-3'-phosphate
  modified_base 7: mod_base = OTHER; note = 2'-deoxy-2'-fluorocytidine-3'-phosphate
  modified_base 8: mod_base = OTHER; note = 2'-O-methyluridine-3'-phosphate
  modified_base 9: mod_base = OTHER; note = 2'-deoxy-2'-fluorocytidine-3'-phosphate
  modified_base 10: mod_base = OTHER; note = 2'-deoxy-2'-fluorouridine-3'-phosphate
  modified_base 11: mod_base = OTHER; note = 2'-deoxy-2'-fluoroadenosine-3'-phosphate
  modified_base 12: mod_base = OTHER; note = 2'-O-methylguanosine-3'-phosphate
  modified_base 13: mod_base = OTHER; note = 2'-O-methyluridine-3'-phosphate
  modified_base 14: mod_base = OTHER; note = 2'-O-methylcytidine-3'-phosphate
  modified_base 15: mod_base = OTHER; note = 2'-O-methylcytidine-3'-phosphate
  modified_base 16: mod_base = OTHER; note = 2'-O-methyluridine-3'-phosphate
  modified_base 17: mod_base = OTHER; note = 2'-O-methylguanosine-3'-phosphate
  modified_base 18: mod_base = OTHER; note = 2'-O-methylcytidine-3'-phosphate
  modified_base 19: mod_base = OTHER; note = 2'-O-methyladenosine-3'-phosphorothioate
  modified_base 20: mod_base = OTHER; note = 2'-O-methyluridine-3'-phosphorothioate
  modified_base 21: mod_base = OTHER; note = 2'-O-methyladenosine
tgatgcctctagtcctgcata

SEQ ID NO: 1907 - RNA, 21 nt, synthetic construct
  source 1..21: mol_type = other RNA
  modified_base 1: mod_base = OTHER; note = 2'-O-methylcytidine-3'-phosphorothioate
  modified_base 2: mod_base = OTHER; note = 2'-O-methylcytidine-3'-phosphorothioate
  modified_base 3: mod_base = OTHER; note = 2'-O-methyluridine-3'-phosphate
  modified_base 4: mod_base = OTHER; note = 2'-O-methylcytidine-3'-phosphate
  modified_base 5: mod_base = OTHER; note = 2'-O-methyluridine-3'-phosphate
  modified_base 6: mod_base = OTHER; note = 2'-O-hexadecyl-adenosine-3'-phosphate
  modified_base 7: mod_base = OTHER; note = 2'-deoxy-2'-fluoroguanosine-3'-phosphate
  modified_base 8: mod_base = OTHER; note = 2'-O-methyluridine-3'-phosphate
  modified_base 9: mod_base = OTHER; note = 2'-deoxy-2'-fluorocytidine-3'-phosphate
  modified_base 10: mod_base = OTHER; note = 2'-deoxy-2'-fluorocytidine-3'-phosphate
  modified_base 11: mod_base = OTHER; note = 2'-deoxy-2'-fluorouridine-3'-phosphate
  modified_base 12: mod_base = OTHER; note = 2'-O-methylguanosine-3'-phosphate
  modified_base 13: mod_base = OTHER; note = 2'-O-methylcytidine-3'-phosphate
  modified_base 14: mod_base = OTHER; note = 2'-O-methyladenosine-3'-phosphate
  modified_base 15: mod_base = OTHER; note = 2'-O-methyluridine-3'-phosphate
  modified_base 16: mod_base = OTHER; note = 2'-O-methylcytidine-3'-phosphate
  modified_base 17: mod_base = OTHER; note = 2'-O-methyladenosine-3'-phosphate
  modified_base 18: mod_base = OTHER; note = 2'-O-methyluridine-3'-phosphate
  modified_base 19: mod_base = OTHER; note = 2'-O-methylcytidine-3'-phosphorothioate
  modified_base 20: mod_base = OTHER; note = 2'-O-methylcytidine-3'-phosphorothioate
  modified_base 21: mod_base = OTHER; note = 2'-O-methyladenosine
cctctagtcctgcatcatcca

SEQ ID NO: 1908 - RNA, 21 nt, synthetic construct
  source 1..21: mol_type = other RNA
  modified_base 1: mod_base = OTHER; note = 2'-O-methylguanosine-3'-phosphorothioate
  modified_base 2: mod_base = OTHER; note = 2'-O-methyluridine-3'-phosphorothioate
  modified_base 3: mod_base = OTHER; note = 2'-O-methylcytidine-3'-phosphate
  modified_base 4: mod_base = OTHER; note = 2'-O-methylcytidine-3'-phosphate
  modified_base 5: mod_base = OTHER; note = 2'-O-methyluridine-3'-phosphate
  modified_base 6: mod_base = OTHER; note = 2'-O-hexadecyl-guanosine-3'-phosphate
  modified_base 7: mod_base = OTHER; note = 2'-deoxy-2'-fluorocytidine-3'-phosphate
  modified_base 8: mod_base = OTHER; note = 2'-O-methyladenosine-3'-phosphate
  modified_base 9: mod_base = OTHER; note = 2'-deoxy-2'-fluorouridine-3'-phosphate
  modified_base 10: mod_base = OTHER; note = 2'-deoxy-2'-fluorocytidine-3'-phosphate
  modified_base 11: mod_base = OTHER; note = 2'-deoxy-2'-fluoroadenosine-3'-phosphate
  modified_base 12: mod_base = OTHER; note = 2'-O-methyluridine-3'-phosphate
  modified_base 13: mod_base = OTHER; note = 2'-O-methylcytidine-3'-phosphate
  modified_base 14: mod_base = OTHER; note = 2'-O-methylcytidine-3'-phosphate
  modified_base 15: mod_base = OTHER; note = 2'-O-methyladenosine-3'-phosphate
  modified_base 16: mod_base = OTHER; note = 2'-O-methylguanosine-3'-phosphate
  modified_base 17: mod_base = OTHER; note = 2'-O-methyladenosine-3'-phosphate
  modified_base 18: mod_base = OTHER; note = 2'-O-methylguanosine-3'-phosphate
  modified_base 19: mod_base = OTHER; note = 2'-O-methylcytidine-3'-phosphorothioate
  modified_base 20: mod_base = OTHER; note = 2'-O-methylguanosine-3'-phosphorothioate
  modified_base 21: mod_base = OTHER; note = 2'-O-methyladenosine
gtcctgcatcatccagagcga

SEQ ID NO: 1909 - RNA, 21 nt, synthetic construct
  source 1..21: mol_type = other RNA
  modified_base 1: mod_base = OTHER; note = 2'-O-methylcytidine-3'-phosphorothioate
  modified_base 2: mod_base = OTHER; note = 2'-O-methylcytidine-3'-phosphorothioate
  modified_base 3: mod_base = OTHER; note = 2'-O-methylguanosine-3'-phosphate
  modified_base 4: mod_base = OTHER; note = 2'-O-methylguanosine-3'-phosphate
  modified_base 5: mod_base = OTHER; note = 2'-O-methyladenosine-3'-phosphate
  modified_base 6: mod_base = OTHER; note = 2'-O-hexadecyl-cytidine-3'-phosphate
  modified_base 7: mod_base = OTHER; note = 2'-deoxy-2'-fluorouridine-3'-phosphate
  modified_base 8: mod_base = OTHER; note = 2'-O-methylguanosine-3'-phosphate
  modified_base 9: mod_base = OTHER; note = 2'-deoxy-2'-fluorocytidine-3'-phosphate
  modified_base 10: mod_base = OTHER; note = 2'-deoxy-2'-fluoroguanosine-3'-phosphate
  modified_base 11: mod_base = OTHER; note = 2'-deoxy-2'-fluoroadenosine-3'-phosphate
  modified_base 12: mod_base = OTHER; note = 2'-O-methylguanosine-3'-phosphate
  modified_base 13: mod_base = OTHER; note = 2'-O-methyladenosine-3'-phosphate
  modified_base 14: mod_base = OTHER; note = 2'-O-methyluridine-3'-phosphate
  modified_base 15: mod_base = OTHER; note = 2'-O-methylguanosine-3'-phosphate
  modified_base 16: mod_base = OTHER; note = 2'-O-methylguanosine-3'-phosphate
  modified_base 17: mod_base = OTHER; note = 2'-O-methyladenosine-3'-phosphate
  modified_base 18: mod_base = OTHER; note = 2'-O-methylguanosine-3'-phosphate
  modified_base 19: mod_base = OTHER; note = 2'-O-methylguanosine-3'-phosphorothioate
  modified_base 20: mod_base = OTHER; note = 2'-O-methyladenosine-3'-phosphorothioate
  modified_base 21: mod_base = OTHER; note = 2'-O-methyladenosine
ccggactgcgagatggaggaa

SEQ ID NO: 1910 - RNA, 21 nt, synthetic construct
  source 1..21: mol_type = other RNA
  modified_base 1: mod_base = OTHER; note = 2'-O-methylcytidine-3'-phosphorothioate
  modified_base 2: mod_base = OTHER; note = 2'-O-methyladenosine-3'-phosphorothioate
  modified_base 3: mod_base = OTHER; note = 2'-O-methylcytidine-3'-phosphate
  modified_base 4: mod_base = OTHER; note = 2'-O-methylcytidine-3'-phosphate
  modified_base 5: mod_base = OTHER; note = 2'-O-methylcytidine-3'-phosphate
  modified_base 6: mod_base = OTHER; note = 2'-O-hexadecyl-guanosine-3'-phosphate
  modified_base 7: mod_base = OTHER; note = 2'-deoxy-2'-fluoroguanosine-3'-phosphate
  modified_base 8: mod_base = OTHER; note = 2'-O-methylcytidine-3'-phosphate
  modified_base 9: mod_base = OTHER; note = 2'-deoxy-2'-fluoroadenosine-3'-phosphate
  modified_base 10: mod_base = OTHER; note = 2'-deoxy-2'-fluoroguanosine-3'-phosphate
  modified_base 11: mod_base = OTHER; note = 2'-deoxy-2'-fluoroguanosine-3'-phosphate
  modified_base 12: mod_base = OTHER; note = 2'-O-methylcytidine-3'-phosphate
  modified_base 13: mod_base = OTHER; note = 2'-O-methyluridine-3'-phosphate
  modified_base 14: mod_base = OTHER; note = 2'-O-methyluridine-3'-phosphate
  modified_base 15: mod_base = OTHER; note = 2'-O-methyladenosine-3'-phosphate
  modified_base 16: mod_base = OTHER; note = 2'-O-methyluridine-3'-phosphate
  modified_base 17: mod_base = OTHER; note = 2'-O-methylcytidine-3'-phosphate
  modified_base 18: mod_base = OTHER; note = 2'-O-methyluridine-3'-phosphate
  modified_base 19: mod_base = OTHER; note = 2'-O-methylguanosine-3'-phosphorothioate
  modified_base 20: mod_base = OTHER; note = 2'-O-methyluridine-3'-phosphorothioate
  modified_base 21: mod_base = OTHER; note = 2'-O-methyladenosine
cacccggcaggcttatctgta

SEQ ID NO: 1911 - RNA, 21 nt, synthetic construct
  source 1..21: mol_type = other RNA
  modified_base 1: mod_base = OTHER; note = 2'-O-methylguanosine-3'-phosphorothioate
  modified_base 2: mod_base = OTHER; note = 2'-O-methylguanosine-3'-phosphorothioate
  modified_base 3: mod_base = OTHER; note = 2'-O-methylcytidine-3'-phosphate
  modified_base 4: mod_base = OTHER; note = 2'-O-methyladenosine-3'-phosphate
  modified_base 5: mod_base = OTHER; note = 2'-O-methylguanosine-3'-phosphate
  modified_base 6: mod_base = OTHER; note = 2'-O-hexadecyl-guanosine-3'-phosphate
  modified_base 7: mod_base = OTHER; note = 2'-deoxy-2'-fluorocytidine-3'-phosphate
  modified_base 8: mod_base = OTHER; note = 2'-O-methyluridine-3'-phosphate
  modified_base 9: mod_base = OTHER; note = 2'-deoxy-2'-fluorouridine-3'-phosphate
  modified_base 10: mod_base = OTHER; note = 2'-deoxy-2'-fluoroadenosine-3'-phosphate
  modified_base 11: mod_base = OTHER; note = 2'-deoxy-2'-fluorouridine-3'-phosphate
  modified_base 12: mod_base = OTHER; note = 2'-O-methylcytidine-3'-phosphate
  modified_base 13: mod_base = OTHER; note = 2'-O-methyluridine-3'-phosphate
  modified_base 14: mod_base = OTHER; note = 2'-O-methylguanosine-3'-phosphate
  modified_base 15: mod_base = OTHER; note = 2'-O-methyluridine-3'-phosphate
  modified_base 16: mod_base = OTHER; note = 2'-O-methylcytidine-3'-phosphate
  modified_base 17: mod_base = OTHER; note = 2'-O-methyluridine-3'-phosphate
  modified_base 18: mod_base = OTHER; note = 2'-O-methyluridine-3'-phosphate
  modified_base 19: mod_base = OTHER; note = 2'-O-methylguanosine-3'-phosphorothioate
  modified_base 20: mod_base = OTHER; note = 2'-O-methylguanosine-3'-phosphorothioate
  modified_base 21: mod_base = OTHER; note = 2'-O-methyladenosine
ggcaggcttatctgtcttgga

SEQ ID NO: 1912 - RNA, 21 nt, synthetic construct
  source 1..21: mol_type = other RNA
  modified_base 1: mod_base = OTHER; note = 2'-O-methyladenosine-3'-phosphorothioate
  modified_base 2: mod_base = OTHER; note = 2'-O-methyluridine-3'-phosphorothioate
  modified_base 3: mod_base = OTHER; note = 2'-O-methylcytidine-3'-phosphate
  modified_base 4: mod_base = OTHER; note = 2'-O-methyluridine-3'-phosphate
  modified_base 5: mod_base = OTHER; note = 2'-O-methylguanosine-3'-phosphate
  modified_base 6: mod_base = OTHER; note = 2'-O-hexadecyl-uridine-3'-phosphate
  modified_base 7: mod_base = OTHER; note = 2'-deoxy-2'-fluorocytidine-3'-phosphate
  modified_base 8: mod_base = OTHER; note = 2'-O-methyluridine-3'-phosphate
  modified_base 9: mod_base = OTHER; note = 2'-deoxy-2'-fluorouridine-3'-phosphate
  modified_base 10: mod_base = OTHER; note = 2'-deoxy-2'-fluoroguanosine-3'-phosphate
  modified_base 11: mod_base = OTHER; note = 2'-deoxy-2'-fluoroguanosine-3'-phosphate
  modified_base 12: mod_base = OTHER; note = 2'-O-methylguanosine-3'-phosphate
  modified_base 13: mod_base = OTHER; note = 2'-O-methylcytidine-3'-phosphate
  modified_base 14: mod_base = OTHER; note = 2'-O-methylcytidine-3'-phosphate
  modified_base 15: mod_base = OTHER; note = 2'-O-methyluridine-3'-phosphate
  modified_base 16: mod_base = OTHER; note = 2'-O-methylcytidine-3'-phosphate
  modified_base 17: mod_base = OTHER; note = 2'-O-methyluridine-3'-phosphate
  modified_base 18: mod_base = OTHER; note = 2'-O-methyluridine-3'-phosphate
  modified_base 19: mod_base = OTHER; note = 2'-O-methyluridine-3'-phosphorothioate
  modified_base 20: mod_base = OTHER; note = 2'-O-methyluridine-3'-phosphorothioate
  modified_base 21: mod_base = OTHER; note = 2'-O-methyladenosine
atctgtcttgggcctctttta

SEQ ID NO: 1913 - RNA, 21 nt, synthetic construct
  source 1..21: mol_type = other RNA
  modified_base 1: mod_base = OTHER; note = 2'-O-methyluridine-3'-phosphorothioate
  modified_base 2: mod_base = OTHER; note = 2'-O-methylcytidine-3'-phosphorothioate
  modified_base 3: mod_base = OTHER; note = 2'-O-methyluridine-3'-phosphate
  modified_base 4: mod_base = OTHER; note = 2'-O-methyluridine-3'-phosphate
  modified_base 5: mod_base = OTHER; note = 2'-O-methylguanosine-3'-phosphate
  modified_base 6: mod_base = OTHER; note = 2'-O-hexadecyl-guanosine-3'-phosphate
  modified_base 7: mod_base = OTHER; note = 2'-deoxy-2'-fluoroguanosine-3'-phosphate
  modified_base 8: mod_base = OTHER; note = 2'-O-methylcytidine-3'-phosphate
  modified_base 9: mod_base = OTHER; note = 2'-deoxy-2'-fluorocytidine-3'-phosphate
  modified_base 10: mod_base = OTHER; note = 2'-deoxy-2'-fluorouridine-3'-phosphate
  modified_base 11: mod_base = OTHER; note = 2'-deoxy-2'-fluorocytidine-3'-phosphate
  modified_base 12: mod_base = OTHER; note = 2'-O-methyluridine-3'-phosphate
  modified_base 13: mod_base = OTHER; note = 2'-O-methyluridine-3'-phosphate
  modified_base 14: mod_base = OTHER; note = 2'-O-methyluridine-3'-phosphate
  modified_base 15: mod_base = OTHER; note = 2'-O-methyluridine-3'-phosphate
  modified_base 16: mod_base = OTHER; note = 2'-O-methylguanosine-3'-phosphate
  modified_base 17: mod_base = OTHER; note = 2'-O-methyluridine-3'-phosphate
  modified_base 18: mod_base = OTHER; note = 2'-O-methylcytidine-3'-phosphate
  modified_base 19: mod_base = OTHER; note = 2'-O-methyladenosine-3'-phosphorothioate
  modified_base 20: mod_base = OTHER; note = 2'-O-methylcytidine-3'-phosphorothioate
  modified_base 21: mod_base = OTHER; note = 2'-O-methyladenosine
tcttgggcctcttttgtcaca

SEQ ID NO: 1914 - RNA, 21 nt, synthetic construct
  source 1..21: mol_type = other RNA
  modified_base 1: mod_base = OTHER; note = 2'-O-methylguanosine-3'-phosphorothioate
  modified_base 2: mod_base = OTHER; note = 2'-O-methylguanosine-3'-phosphorothioate
  modified_base 3: mod_base = OTHER; note = 2'-O-methylcytidine-3'-phosphate
  modified_base 4: mod_base = OTHER; note = 2'-O-methylcytidine-3'-phosphate
  modified_base 5: mod_base = OTHER; note = 2'-O-methyluridine-3'-phosphate
  modified_base 6: mod_base = OTHER; note = 2'-O-hexadecyl-cytidine-3'-phosphate
  modified_base 7: mod_base = OTHER; note = 2'-deoxy-2'-fluorouridine-3'-phosphate
  modified_base 8: mod_base = OTHER; note = 2'-O-methyluridine-3'-phosphate
  modified_base 9: mod_base = OTHER; note = 2'-deoxy-2'-fluorouridine-3'-phosphate
  modified_base 10: mod_base = OTHER; note = 2'-deoxy-2'-fluorouridine-3'-phosphate
  modified_base 11: mod_base = OTHER; note = 2'-deoxy-2'-fluoroguanosine-3'-phosphate
  modified_base 12: mod_base = OTHER; note = 2'-O-methyluridine-3'-phosphate
  modified_base 13: mod_base = OTHER; note = 2'-O-methylcytidine-3'-phosphate
  modified_base 14: mod_base = OTHER; note = 2'-O-methyladenosine-3'-phosphate
  modified_base 15: mod_base = OTHER; note = 2'-O-methylcytidine-3'-phosphate
  modified_base 16: mod_base = OTHER; note = 2'-O-methyladenosine-3'-phosphate
  modified_base 17: mod_base = OTHER; note = 2'-O-methyluridine-3'-phosphate
  modified_base 18: mod_base = OTHER; note = 2'-O-methyladenosine-3'-phosphate
  modified_base 19: mod_base = OTHER; note = 2'-O-methyluridine-3'-phosphorothioate
  modified_base 20: mod_base = OTHER; note = 2'-O-methyluridine-3'-phosphorothioate
  modified_base 21: mod_base = OTHER; note = 2'-O-methyladenosine
ggcctcttttgtcacatatta

SEQ ID NO: 1915 - RNA, 21 nt, synthetic construct
  source 1..21: mol_type = other RNA
  modified_base 1: mod_base = OTHER; note = 2'-O-methyluridine-3'-phosphorothioate
  modified_base 2: mod_base = OTHER; note = 2'-O-methyluridine-3'-phosphorothioate
  modified_base 3: mod_base = OTHER; note = 2'-O-methyluridine-3'-phosphate
  modified_base 4: mod_base = OTHER; note = 2'-O-methyluridine-3'-phosphate
  modified_base 5: mod_base = OTHER; note = 2'-O-methylguanosine-3'-phosphate
  modified_base 6: mod_base = OTHER; note = 2'-O-hexadecyl-uridine-3'-phosphate
  modified_base 7: mod_base = OTHER; note = 2'-deoxy-2'-fluorocytidine-3'-phosphate
  modified_base 8: mod_base = OTHER; note = 2'-O-methyladenosine-3'-phosphate
  modified_base 9: mod_base = OTHER; note = 2'-deoxy-2'-fluorocytidine-3'-phosphate
  modified_base 10: mod_base = OTHER; note = 2'-deoxy-2'-fluoroadenosine-3'-phosphate
  modified_base 11: mod_base = OTHER; note = 2'-deoxy-2'-fluorouridine-3'-phosphate
  modified_base 12: mod_base = OTHER; note = 2'-O-methyladenosine-3'-phosphate
  modified_base 13: mod_base = OTHER; note = 2'-O-methyluridine-3'-phosphate
  modified_base 14: mod_base = OTHER; note = 2'-O-methyluridine-3'-phosphate
  modified_base 15: mod_base = OTHER; note = 2'-O-methylguanosine-3'-phosphate
  modified_base 16: mod_base = OTHER; note = 2'-O-methylcytidine-3'-phosphate
  modified_base 17: mod_base = OTHER; note = 2'-O-methyluridine-3'-phosphate
  modified_base 18: mod_base = OTHER; note = 2'-O-methylcytidine-3'-phosphate
  modified_base 19: mod_base = OTHER; note = 2'-O-methyladenosine-3'-phosphorothioate
  modified_base 20: mod_base = OTHER; note = 2'-O-methyluridine-3'-phosphorothioate
  modified_base 21: mod_base = OTHER; note = 2'-O-methyladenosine
ttttgtcacatattgctcata

SEQ ID NO: 1916 - RNA, 21 nt, synthetic construct
  source 1..21: mol_type = other RNA
  modified_base 1: mod_base = OTHER; note = 2'-O-methylcytidine-3'-phosphorothioate
  modified_base 2: mod_base = OTHER; note = 2'-O-methyladenosine-3'-phosphorothioate
  modified_base 3: mod_base = OTHER; note = 2'-O-methylcytidine-3'-phosphate
  modified_base 4: mod_base = OTHER; note = 2'-O-methyladenosine-3'-phosphate
  modified_base 5: mod_base = OTHER; note = 2'-O-methyluridine-3'-phosphate
  modified_base 6: mod_base = OTHER; note = 2'-O-hexadecyl-adenosine-3'-phosphate
  modified_base 7: mod_base = OTHER; note = 2'-deoxy-2'-fluorouridine-3'-phosphate
  modified_base 8: mod_base = OTHER; note = 2'-O-methyluridine-3'-phosphate
  modified_base 9: mod_base = OTHER; note = 2'-deoxy-2'-fluoroguanosine-3'-phosphate
  modified_base 10: mod_base = OTHER; note = 2'-deoxy-2'-fluorocytidine-3'-phosphate
  modified_base 11: mod_base = OTHER; note = 2'-deoxy-2'-fluorouridine-3'-phosphate
  modified_base 12: mod_base = OTHER; note = 2'-O-methylcytidine-3'-phosphate
  modified_base 13: mod_base = OTHER; note = 2'-O-methyladenosine-3'-phosphate
  modified_base 14: mod_base = OTHER; note = 2'-O-methyluridine-3'-phosphate
  modified_base 15: mod_base = OTHER; note = 2'-O-methylcytidine-3'-phosphate
  modified_base 16: mod_base = OTHER; note = 2'-O-methyluridine-3'-phosphate
  modified_base 17: mod_base = OTHER; note = 2'-O-methylguanosine-3'-phosphate
  modified_base 18: mod_base = OTHER; note = 2'-O-methyluridine-3'-phosphate
  modified_base 19: mod_base = OTHER; note = 2'-O-methylguanosine-3'-phosphorothioate
  modified_base 20: mod_base = OTHER; note = 2'-O-methyladenosine-3'-phosphorothioate
  modified_base 21: mod_base = OTHER; note = 2'-O-methyladenosine
cacatattgctcatctgtgaa

SEQ ID NO: 1917 - RNA, 21 nt, synthetic construct
  source 1..21: mol_type = other RNA
  modified_base 1: mod_base = OTHER; note = 2'-O-methyladenosine-3'-phosphorothioate
  modified_base 2: mod_base = OTHER; note = 2'-O-methyluridine-3'-phosphorothioate
  modified_base 3: mod_base = OTHER; note = 2'-O-methyluridine-3'-phosphate
  modified_base 4: mod_base = OTHER; note = 2'-O-methylguanosine-3'-phosphate
  modified_base 5: mod_base = OTHER; note = 2'-O-methylcytidine-3'-phosphate
  modified_base 6: mod_base = OTHER; note = 2'-O-hexadecyl-uridine-3'-phosphate
  modified_base 7: mod_base = OTHER; note = 2'-deoxy-2'-fluorocytidine-3'-phosphate
  modified_base 8: mod_base = OTHER; note = 2'-O-methyladenosine-3'-phosphate
  modified_base 9: mod_base = OTHER; note = 2'-deoxy-2'-fluorouridine-3'-phosphate
  modified_base 10: mod_base = OTHER; note = 2'-deoxy-2'-fluorocytidine-3'-phosphate
  modified_base 11: mod_base = OTHER; note = 2'-deoxy-2'-fluorouridine-3'-phosphate
  modified_base 12: mod_base = OTHER; note = 2'-O-methylguanosine-3'-phosphate
  modified_base 13: mod_base = OTHER; note = 2'-O-methyluridine-3'-phosphate
  modified_base 14: mod_base = OTHER; note = 2'-O-methylguanosine-3'-phosphate
  modified_base 15: mod_base = OTHER; note = 2'-O-methyladenosine-3'-phosphate
  modified_base 16: mod_base = OTHER; note = 2'-O-methylguanosine-3'-phosphate
  modified_base 17: mod_base = OTHER; note = 2'-O-methylcytidine-3'-phosphate
  modified_base 18: mod_base = OTHER; note = 2'-O-methyluridine-3'-phosphate
  modified_base 19: mod_base = OTHER; note = 2'-O-methylguanosine-3'-phosphorothioate
  modified_base 20: mod_base = OTHER; note = 2'-O-methyladenosine-3'-phosphorothioate
  modified_base 21: mod_base = OTHER; note = 2'-O-methyladenosine
attgctcatctgtgagctgaa

SEQ ID NO: 1918 - RNA, 21 nt, synthetic construct
  source 1..21: mol_type = other RNA
  modified_base 1: mod_base = OTHER; note = 2'-O-methylcytidine-3'-phosphorothioate
  modified_base 2: mod_base = OTHER; note = 2'-O-methyladenosine-3'-phosphorothioate
  modified_base 3: mod_base = OTHER; note = 2'-O-methyluridine-3'-phosphate
  modified_base 4: mod_base = OTHER; note = 2'-O-methylcytidine-3'-phosphate
  modified_base 5: mod_base = OTHER; note = 2'-O-methyluridine-3'-phosphate
  modified_base 6: mod_base = OTHER; note = 2'-O-hexadecyl-guanosine-3'-phosphate
  modified_base 7: mod_base = OTHER; note = 2'-deoxy-2'-fluorouridine-3'-phosphate
  modified_base 8: mod_base = OTHER; note = 2'-O-methylguanosine-3'-phosphate
  modified_base 9: mod_base = OTHER; note = 2'-deoxy-2'-fluoroadenosine-3'-phosphate
  modified_base 10: mod_base = OTHER; note = 2'-deoxy-2'-fluoroguanosine-3'-phosphate
  modified_base 11: mod_base = OTHER; note = 2'-deoxy-2'-fluorocytidine-3'-phosphate
  modified_base 12: mod_base = OTHER; note = 2'-O-methyluridine-3'-phosphate
  modified_base 13: mod_base = OTHER; note = 2'-O-methylguanosine-3'-phosphate
  modified_base 14: mod_base = OTHER; note = 2'-O-methyladenosine-3'-phosphate
  modified_base 15: mod_base = OTHER; note = 2'-O-methylguanosine-3'-phosphate
  modified_base 16: mod_base = OTHER; note = 2'-O-methylguanosine-3'-phosphate
  modified_base 17: mod_base = OTHER; note = 2'-O-methylcytidine-3'-phosphate
  modified_base 18: mod_base = OTHER; note = 2'-O-methylcytidine-3'-phosphate
  modified_base 19: mod_base = OTHER; note = 2'-O-methylcytidine-3'-phosphorothioate
  modified_base 20: mod_base = OTHER; note = 2'-O-methyluridine-3'-phosphorothioate
  modified_base 21: mod_base = OTHER; note = 2'-O-methyladenosine
catctgtgagctgaggcccta

SEQ ID NO: 1919 - RNA, 21 nt, synthetic construct
  source 1..21: mol_type = other RNA
  modified_base 1: mod_base = OTHER; note = 2'-O-methylguanosine-3'-phosphorothioate
  modified_base 2: mod_base = OTHER; note = 2'-O-methylguanosine-3'-phosphorothioate
  modified_base 3: mod_base = OTHER; note = 2'-O-methylcytidine-3'-phosphate
  modified_base 4: mod_base = OTHER; note = 2'-O-methylcytidine-3'-phosphate
  modified_base 5: mod_base = OTHER; note = 2'-O-methylcytidine-3'-phosphate
  modified_base 6: mod_base = OTHER; note = 2'-O-hexadecyl-uridine-3'-phosphate
  modified_base 7: mod_base = OTHER; note = 2'-deoxy-2'-fluoroguanosine-3'-phosphate
  modified_base 8: mod_base = OTHER; note = 2'-O-methyladenosine-3'-phosphate
  modified_base 9: mod_base = OTHER; note = 2'-deoxy-2'-fluorocytidine-3'-phosphate
  modified_base 10: mod_base = OTHER; note = 2'-deoxy-2'-fluorouridine-3'-phosphate
  modified_base 11: mod_base = OTHER; note = 2'-deoxy-2'-fluorocytidine-3'-phosphate
  modified_base 12: mod_base = OTHER; note = 2'-O-methyladenosine-3'-phosphate
  modified_base 13: mod_base = OTHER; note = 2'-O-methylcytidine-3'-phosphate
  modified_base 14: mod_base = OTHER; note = 2'-O-methyluridine-3'-phosphate
  modified_base 15: mod_base = OTHER; note = 2'-O-methylguanosine-3'-phosphate
  modified_base 16: mod_base = OTHER; note = 2'-O-methyladenosine-3'-phosphate
  modified_base 17: mod_base = OTHER; note = 2'-O-methylguanosine-3'-phosphate
  modified_base 18: mod_base = OTHER; note = 2'-O-methyluridine-3'-phosphate
  modified_base 19: mod_base = OTHER; note = 2'-O-methyladenosine-3'-phosphorothioate
  modified_base 20: mod_base = OTHER; note = 2'-O-methyluridine-3'-phosphorothioate
  modified_base 21: mod_base = OTHER; note = 2'-O-methyladenosine
ggccctgactcactgagtata

SEQ ID NO: 1920 - RNA, 21 nt, synthetic construct
  source 1..21: mol_type = other RNA
  modified_base 1: mod_base = OTHER; note = 2'-O-methyluridine-3'-phosphorothioate
  modified_base 2: mod_base = OTHER; note = 2'-O-methylguanosine-3'-phosphorothioate
  modified_base 3: mod_base = OTHER; note = 2'-O-methyladenosine-3'-phosphate
  modified_base 4: mod_base = OTHER; note = 2'-O-methylcytidine-3'-phosphate
  modified_base 5: mod_base = OTHER; note = 2'-O-methyluridine-3'-phosphate
  modified_base 6: mod_base = OTHER; note = 2'-O-hexadecyl-cytidine-3'-phosphate
  modified_base 7: mod_base = OTHER; note = 2'-deoxy-2'-fluoroadenosine-3'-phosphate
  modified_base 8: mod_base = OTHER; note = 2'-O-methylcytidine-3'-phosphate
  modified_base 9: mod_base = OTHER; note = 2'-deoxy-2'-fluorouridine-3'-phosphate
  modified_base 10: mod_base = OTHER; note = 2'-deoxy-2'-fluoroguanosine-3'-phosphate
  modified_base 11: mod_base = OTHER; note = 2'-deoxy-2'-fluoroadenosine-3'-phosphate
  modified_base 12: mod_base = OTHER; note = 2'-O-methylguanosine-3'-phosphate
  modified_base 13: mod_base = OTHER; note = 2'-O-methyluridine-3'-phosphate
  modified_base 14: mod_base = OTHER; note = 2'-O-methyladenosine-3'-phosphate
  modified_base 15: mod_base = OTHER; note = 2'-O-methyluridine-3'-phosphate
  modified_base 16: mod_base = OTHER; note = 2'-O-methyluridine-3'-phosphate
  modified_base 17: mod_base = OTHER; note = 2'-O-methyluridine-3'-phosphate
  modified_base 18: mod_base = OTHER; note = 2'-O-methyluridine-3'-phosphate
  modified_base 19: mod_base = OTHER; note = 2'-O-methyluridine-3'-phosphorothioate
  modified_base 20: mod_base = OTHER; note = 2'-O-methylguanosine-3'-phosphorothioate
  modified_base 21: mod_base = OTHER; note = 2'-O-methyladenosine
tgactcactgagtatttttga

SEQ ID NO: 1921 - RNA, 21 nt, synthetic construct
  source 1..21: mol_type = other RNA
  modified_base 1: mod_base = OTHER; note = 2'-O-methylguanosine-3'-phosphorothioate
  modified_base 2: mod_base = OTHER; note = 2'-O-methyladenosine-3'-phosphorothioate
  modified_base 3: mod_base = OTHER; note = 2'-O-methylguanosine-3'-phosphate
  modified_base 4: mod_base = OTHER; note = 2'-O-methylcytidine-3'-phosphate
  modified_base 5: mod_base = OTHER; note = 2'-O-methyladenosine-3'-phosphate
  modified_base 6: mod_base = OTHER; note = 2'-O-hexadecyl-guanosine-3'-phosphate
  modified_base 7: mod_base = OTHER; note = 2'-deoxy-2'-fluoroadenosine-3'-phosphate
  modified_base 8: mod_base = OTHER; note = 2'-O-methyladenosine-3'-phosphate
  modified_base 9: mod_base = OTHER; note = 2'-deoxy-2'-fluoroguanosine-3'-phosphate
  modified_base 10: mod_base = OTHER; note = 2'-deoxy-2'-fluoroadenosine-3'-phosphate
  modified_base 11: mod_base = OTHER; note = 2'-deoxy-2'-fluoroadenosine-3'-phosphate
  modified_base 12: mod_base = OTHER; note = 2'-O-methylguanosine-3'-phosphate
  modified_base 13: mod_base = OTHER; note = 2'-O-methylguanosine-3'-phosphate
  modified_base 14: mod_base = OTHER; note = 2'-O-methyladenosine-3'-phosphate
  modified_base 15: mod_base = OTHER; note = 2'-O-methylguanosine-3'-phosphate
  modified_base 16: mod_base = OTHER; note = 2'-O-methyladenosine-3'-phosphate
  modified_base 17: mod_base = OTHER; note = 2'-O-methylcytidine-3'-phosphate
  modified_base 18: mod_base = OTHER; note = 2'-O-methyladenosine-3'-phosphate
  modified_base 19: mod_base = OTHER; note = 2'-O-methyluridine-3'-phosphorothioate
  modified_base 20: mod_base = OTHER; note = 2'-O-methyluridine-3'-phosphorothioate
  modified_base 21: mod_base = OTHER; note = 2'-O-methyladenosine
gagcagaagaaggagacatta

SEQ ID NO: 1922 - RNA, 21 nt, synthetic construct
  source 1..21: mol_type = other RNA
  modified_base 1: mod_base = OTHER; note = 2'-O-methylguanosine-3'-phosphorothioate
  modified_base 2: mod_base = OTHER; note = 2'-O-methyladenosine-3'-phosphorothioate
  modified_base 3: mod_base = OTHER; note = 2'-O-methyladenosine-3'-phosphate
  modified_base 4: mod_base = OTHER; note = 2'-O-methylguanosine-3'-phosphate
  modified_base 5: mod_base = OTHER; note = 2'-O-methyladenosine-3'-phosphate
  modified_base 6: mod_base = OTHER; note = 2'-O-hexadecyl-adenosine-3'-phosphate
  modified_base 7: mod_base = OTHER; note = 2'-deoxy-2'-fluoroguanosine-3'-phosphate
  modified_base 8: mod_base = OTHER; note = 2'-O-methylguanosine-3'-phosphate
  modified_base 9: mod_base = OTHER; note = 2'-deoxy-2'-fluoroadenosine-3'-phosphate
  modified_base 10: mod_base = OTHER; note = 2'-deoxy-2'-fluoroguanosine-3'-phosphate
  modified_base 11: mod_base = OTHER; note = 2'-deoxy-2'-fluoroadenosine-3'-phosphate
  modified_base 12: mod_base = OTHER; note = 2'-O-methylcytidine-3'-phosphate
  modified_base 13: mod_base = OTHER; note = 2'-O-methyladenosine-3'-phosphate
  modified_base 14: mod_base = OTHER; note = 2'-O-methyluridine-3'-phosphate
  modified_base 15: mod_base = OTHER; note = 2'-O-methyluridine-3'-phosphate
  modified_base 16: mod_base = OTHER; note = 2'-O-methyluridine-3'-phosphate
  modified_base 17: mod_base = OTHER; note = 2'-O-methylcytidine-3'-phosphate
  modified_base 18: mod_base = OTHER; note = 2'-O-methyluridine-3'-phosphate
  modified_base 19: mod_base = OTHER; note = 2'-O-methylcytidine-3'-phosphorothioate
  modified_base 20: mod_base = OTHER; note = 2'-O-methyluridine-3'-phosphorothioate
  modified_base 21: mod_base = OTHER; note = 2'-O-methyladenosine
gaagaaggagacatttctcta

SEQ ID NO: 1923 - RNA, 21 nt, synthetic construct
  source 1..21: mol_type = other RNA
  modified_base 1: mod_base = OTHER; note = 2'-O-methylguanosine-3'-phosphorothioate
  modified_base 2: mod_base = OTHER; note = 2'-O-methylguanosine-3'-phosphorothioate
  modified_base 3: mod_base = OTHER; note = 2'-O-methyladenosine-3'-phosphate
  modified_base 4: mod_base = OTHER; note = 2'-O-methylguanosine-3'-phosphate
  modified_base 5: mod_base = OTHER; note = 2'-O-methyladenosine-3'-phosphate
  modified_base 6: mod_base = OTHER; note = 2'-O-hexadecyl-cytidine-3'-phosphate
  modified_base 7: mod_base = OTHER; note = 2'-deoxy-2'-fluoroadenosine-3'-phosphate
  modified_base 8: mod_base = OTHER; note = 2'-O-methyluridine-3'-phosphate
  modified_base 9: mod_base = OTHER; note = 2'-deoxy-2'-fluorouridine-3'-phosphate
  modified_base 10: mod_base = OTHER; note = 2'-deoxy-2'-fluorouridine-3'-phosphate
  modified_base 11: mod_base = OTHER; note = 2'-deoxy-2'-fluorocytidine-3'-phosphate
  modified_base 12: mod_base = OTHER; note = 2'-O-methyluridine-3'-phosphate
  modified_base 13: mod_base = OTHER; note = 2'-O-methylcytidine-3'-phosphate
  modified_base 14: mod_base = OTHER; note = 2'-O-methyluridine-3'-phosphate
  modified_base 15: mod_base = OTHER; note = 2'-O-methylcytidine-3'-phosphate
  modified_base 16: mod_base = OTHER; note = 2'-O-methylcytidine-3'-phosphate
  modified_base 17: mod_base = OTHER; note = 2'-O-methylguanosine-3'-phosphate
  modified_base 18: mod_base = OTHER; note = 2'-O-methyladenosine-3'-phosphate
  modified_base 19: mod_base = OTHER; note = 2'-O-methyladenosine-3'-phosphorothioate
  modified_base 20: mod_base = OTHER; note = 2'-O-methyladenosine-3'-phosphorothioate
  modified_base 21: mod_base = OTHER; note = 2'-O-methyladenosine
ggagacatttctctccgaaaa

SEQ ID NO: 1924 - RNA, 21 nt, synthetic construct
  source 1..21: mol_type = other RNA
  modified_base 1: mod_base = OTHER; note = 2'-O-methyluridine-3'-phosphorothioate
  modified_base 2: mod_base = OTHER; note = 2'-O-methyluridine-3'-phosphorothioate
  modified_base 3: mod_base = OTHER; note = 2'-O-methyluridine-3'-phosphate
  modified_base 4: mod_base = OTHER; note = 2'-O-methylcytidine-3'-phosphate
  modified_base 5: mod_base = OTHER; note = 2'-O-methyluridine-3'-phosphate
  modified_base 6: mod_base = OTHER; note = 2'-O-hexadecyl-cytidine-3'-phosphate
  modified_base 7: mod_base = OTHER; note = 2'-deoxy-2'-fluorouridine-3'-phosphate
  modified_base 8: mod_base = OTHER; note = 2'-O-methylcytidine-3'-phosphate
  modified_base 9: mod_base = OTHER; note = 2'-deoxy-2'-fluorocytidine-3'-phosphate
  modified_base 10: mod_base = OTHER; note = 2'-deoxy-2'-fluoroguanosine-3'-phosphate
  modified_base 11: mod_base = OTHER; note = 2'-deoxy-2'-fluoroadenosine-3'-phosphate
  modified_base 12: mod_base = OTHER; note = 2'-O-methyladenosine-3'-phosphate
  modified_base 13: mod_base = OTHER; note = 2'-O-methyladenosine-3'-phosphate
  modified_base 14: mod_base = OTHER; note = 2'-O-methyladenosine-3'-phosphate
  modified_base 15: mod_base = OTHER; note = 2'-O-methyluridine-3'-phosphate
  modified_base 16: mod_base = OTHER; note = 2'-O-methylguanosine-3'-phosphate
  modified_base 17: mod_base = OTHER; note = 2'-O-methyladenosine-3'-phosphate
  modified_base 18: mod_base = OTHER; note = 2'-O-methyladenosine-3'-phosphate
  modified_base 19: mod_base = OTHER; note = 2'-O-methylcytidine-3'-phosphorothioate
  modified_base 20: mod_base = OTHER; note = 2'-O-methyluridine-3'-phosphorothioate
  modified_base 21: mod_base = OTHER; note = 2'-O-methyladenosine
tttctctccgaaaatgaacta

SEQ ID NO: 1925 - RNA, 21 nt, synthetic construct
  source 1..21: mol_type = other RNA
  modified_base 1: mod_base = OTHER; note = 2'-O-methylcytidine-3'-phosphorothioate
  modified_base 2: mod_base = OTHER; note = 2'-O-methyluridine-3'-phosphorothioate
  modified_base 3: mod_base = OTHER; note = 2'-O-methylcytidine-3'-phosphate
  modified_base 4: mod_base = OTHER; note = 2'-O-methylcytidine-3'-phosphate
  modified_base 5: mod_base = OTHER; note = 2'-O-methylguanosine-3'-phosphate
  modified_base 6: mod_base = OTHER; note = 2'-O-hexadecyl-adenosine-3'-phosphate
  modified_base 7: mod_base = OTHER; note = 2'-deoxy-2'-fluoroadenosine-3'-phosphate
  modified_base 8: mod_base = OTHER; note = 2'-O-methyladenosine-3'-phosphate
  modified_base 9: mod_base = OTHER; note = 2'-deoxy-2'-fluoroadenosine-3'-phosphate
  modified_base 10: mod_base = OTHER; note = 2'-deoxy-2'-fluorouridine-3'-phosphate
  modified_base 11: mod_base = OTHER; note = 2'-deoxy-2'-fluoroguanosine-3'-phosphate
  modified_base 12: mod_base = OTHER; note = 2'-O-methyladenosine-3'-phosphate
  modified_base 13: mod_base = OTHER; note = 2'-O-methyladenosine-3'-phosphate
  modified_base 14: mod_base = OTHER; note = 2'-O-methylcytidine-3'-phosphate
  modified_base 15: mod_base = OTHER; note = 2'-O-methyluridine-3'-phosphate
  modified_base 16: mod_base = OTHER; note = 2'-O-methylcytidine-3'-phosphate
  modified_base 17: mod_base = OTHER; note = 2'-O-methyladenosine-3'-phosphate
  modified_base 18: mod_base = OTHER; note = 2'-O-methyladenosine-3'-phosphate
  modified_base 19: mod_base = OTHER; note = 2'-O-methylcytidine-3'-phosphorothioate
  modified_base 20: mod_base = OTHER; note = 2'-O-methyladenosine-3'-phosphorothioate
  modified_base 21: mod_base = OTHER; note = 2'-O-methyladenosine
ctccgaaaatgaactcaacaa

SEQ ID NO: 1926 - RNA, 21 nt, synthetic construct
  source 1..21: mol_type = other RNA
  modified_base 1: mod_base = OTHER; note = 2'-O-methyladenosine-3'-phosphorothioate
  modified_base 2: mod_base = OTHER; note = 2'-O-methyladenosine-3'-phosphorothioate
  modified_base 3: mod_base = OTHER; note = 2'-O-methyladenosine-3'-phosphate
  modified_base 4: mod_base = OTHER; note = 2'-O-methyladenosine-3'-phosphate
  modified_base 5: mod_base = OTHER; note = 2'-O-methyluridine-3'-phosphate
  modified_base 6: mod_base = OTHER; note = 2'-O-hexadecyl-guanosine-3'-phosphate
  modified_base 7: mod_base = OTHER; note = 2'-deoxy-2'-fluoroadenosine-3'-phosphate
  modified_base 8: mod_base = OTHER; note = 2'-O-methyladenosine-3'-phosphate
  modified_base 9: mod_base = OTHER; note = 2'-deoxy-2'-fluorocytidine-3'-phosphate
  modified_base 10: mod_base = OTHER; note = 2'-deoxy-2'-fluorouridine-3'-phosphate
  modified_base 11: mod_base = OTHER; note = 2'-deoxy-2'-fluorocytidine-3'-phosphate
  modified_base 12: mod_base = OTHER; note = 2'-O-methyladenosine-3'-phosphate
  modified_base 13: mod_base = OTHER; note = 2'-O-methyladenosine-3'-phosphate
  modified_base 14: mod_base = OTHER; note = 2'-O-methylcytidine-3'-phosphate
  modified_base 15: mod_base = OTHER; note = 2'-O-methyladenosine-3'-phosphate
  modified_base 16: mod_base = OTHER; note = 2'-O-methylguanosine-3'-phosphate
  modified_base 17: mod_base = OTHER; note = 2'-O-methylguanosine-3'-phosphate
  modified_base 18: mod_base = OTHER; note = 2'-O-methylcytidine-3'-phosphate
  modified_base 19: mod_base = OTHER; note = 2'-O-methylcytidine-3'-phosphorothioate
  modified_base 20: mod_base = OTHER; note = 2'-O-methyladenosine-3'-phosphorothioate
  modified_base 21: mod_base = OTHER; note = 2'-O-methyladenosine
aaaatgaactcaacaggccaa

SEQ ID NO: 1927 - RNA, 21 nt, synthetic construct
  source 1..21: mol_type = other RNA
  modified_base 1: mod_base = OTHER; note = 2'-O-methylguanosine-3'-phosphorothioate
  modified_base 2: mod_base = OTHER; note = 2'-O-methyladenosine-3'-phosphorothioate
  modified_base 3: mod_base = OTHER; note = 2'-O-methyladenosine-3'-phosphate
  modified_base 4: mod_base = OTHER; note = 2'-O-methylcytidine-3'-phosphate
  modified_base 5: mod_base = OTHER; note = 2'-O-methyluridine-3'-phosphate
  modified_base 6: mod_base = OTHER; note = 2'-O-hexadecyl-cytidine-3'-phosphate
  modified_base 7: mod_base = OTHER; note = 2'-deoxy-2'-fluoroadenosine-3'-phosphate
  modified_base 8: mod_base = OTHER; note = 2'-O-methyladenosine-3'-phosphate
  modified_base 9: mod_base = OTHER; note = 2'-deoxy-2'-fluorocytidine-3'-phosphate
  modified_base 10: mod_base = OTHER; note = 2'-deoxy-2'-fluoroadenosine-3'-phosphate
  modified_base 11: mod_base = OTHER; note = 2'-deoxy-2'-fluoroguanosine-3'-phosphate
  modified_base 12: mod_base = OTHER; note = 2'-O-methylguanosine-3'-phosphate
  modified_base 13: mod_base = OTHER; note = 2'-O-methylcytidine-3'-phosphate
  modified_base 14: mod_base = OTHER; note = 2'-O-methylcytidine-3'-phosphate
  modified_base 15: mod_base = OTHER; note = 2'-O-methyladenosine-3'-phosphate
  modified_base 16: mod_base = OTHER; note = 2'-O-methylcytidine-3'-phosphate
  modified_base 17: mod_base = OTHER; note = 2'-O-methylcytidine-3'-phosphate
  modified_base 18: mod_base = OTHER; note = 2'-O-methyluridine-3'-phosphate
  modified_base 19: mod_base = OTHER; note = 2'-O-methyluridine-3'-phosphorothioate
  modified_base 20: mod_base = OTHER; note = 2'-O-methylcytidine-3'-phosphorothioate
  modified_base 21: mod_base = OTHER; note = 2'-O-methyladenosine
gaactcaacaggccaccttca

SEQ ID NO: 1928 - RNA, 21 nt, synthetic construct
  source 1..21: mol_type = other RNA
  modified_base 1: mod_base = OTHER; note = 2'-O-methyladenosine-3'-phosphorothioate
  modified_base 2: mod_base = OTHER; note = 2'-O-methylcytidine-3'-phosphorothioate
  modified_base 3: mod_base = OTHER; note = 2'-O-methyladenosine-3'-phosphate
  modified_base 4: mod_base = OTHER; note = 2'-O-methylguanosine-3'-phosphate
  modified_base 5: mod_base = OTHER; note = 2'-O-methylguanosine-3'-phosphate
  modified_base 6: mod_base = OTHER; note = 2'-O-hexadecyl-cytidine-3'-phosphate
  modified_base 7: mod_base = OTHER; note = 2'-deoxy-2'-fluorocytidine-3'-phosphate
  modified_base 8: mod_base = OTHER; note = 2'-O-methyladenosine-3'-phosphate
  modified_base 9: mod_base = OTHER; note = 2'-deoxy-2'-fluorocytidine-3'-phosphate
  modified_base 10: mod_base = OTHER; note = 2'-deoxy-2'-fluorocytidine-3'-phosphate
  modified_base 11: mod_base = OTHER; note = 2'-deoxy-2'-fluorouridine-3'-phosphate
  modified_base 12: mod_base = OTHER; note = 2'-O-methyluridine-3'-phosphate
  modified_base 13: mod_base = OTHER; note = 2'-O-methylcytidine-3'-phosphate
  modified_base 14: mod_base = OTHER; note = 2'-O-methyladenosine-3'-phosphate
  modified_base 15: mod_base = OTHER; note = 2'-O-methylguanosine-3'-phosphate
  modified_base 16: mod_base = OTHER; note = 2'-O-methylguanosine-3'-phosphate
  modified_base 17: mod_base = OTHER; note = 2'-O-methyladenosine-3'-phosphate
  modified_base 18: mod_base = OTHER; note = 2'-O-methyluridine-3'-phosphate
  modified_base 19: mod_base = OTHER; note = 2'-O-methylguanosine-3'-phosphorothioate
  modified_base 20: mod_base = OTHER; note = 2'-O-methylcytidine-3'-phosphorothioate
  modified_base 21: mod_base = OTHER; note = 2'-O-methyladenosine
acaggccaccttcaggatgca

SEQ ID NO: 1929 - RNA, 21 nt, synthetic construct
  source 1..21: mol_type = other RNA
  modified_base 1: mod_base = OTHER; note = 2'-O-methylcytidine-3'-phosphorothioate
  modified_base 2: mod_base = OTHER; note = 2'-O-methylcytidine-3'-phosphorothioate
  modified_base 3: mod_base = OTHER; note = 2'-O-methyladenosine-3'-phosphate
  modified_base 4: mod_base = OTHER; note = 2'-O-methylcytidine-3'-phosphate
  modified_base 5: mod_base = OTHER; note = 2'-O-methylcytidine-3'-phosphate
  modified_base 6: mod_base = OTHER; note = 2'-O-hexadecyl-uridine-3'-phosphate
  modified_base 7: mod_base = OTHER; note = 2'-deoxy-2'-fluorocytidine-3'-phosphate
  modified_base 8: mod_base = OTHER; note = 2'-O-methylguanosine-3'-phosphate
  modified_base 9: mod_base = OTHER; note = 2'-deoxy-2'-fluorocytidine-3'-phosphate
  modified_base 10: mod_base = OTHER; note = 2'-deoxy-2'-fluorouridine-3'-phosphate
  modified_base 11: mod_base = OTHER; note = 2'-deoxy-2'-fluorocytidine-3'-phosphate
  modified_base 12: mod_base = OTHER; note = 2'-O-methylcytidine-3'-phosphate
  modified_base 13: mod_base = OTHER; note = 2'-O-methyladenosine-3'-phosphate
  modified_base 14: mod_base = OTHER; note = 2'-O-methyluridine-3'-phosphate
  modified_base 15: mod_base = OTHER; note = 2'-O-methylguanosine-3'-phosphate
  modified_base 16: mod_base = OTHER; note = 2'-O-methyluridine-3'-phosphate
  modified_base 17: mod_base = OTHER; note = 2'-O-methylguanosine-3'-phosphate
  modified_base 18: mod_base = OTHER; note = 2'-O-methylcytidine-3'-phosphate
  modified_base 19: mod_base = OTHER; note = 2'-O-methylcytidine-3'-phosphorothioate
  modified_base 20: mod_base = OTHER; note = 2'-O-methyluridine-3'-phosphorothioate
  modified_base 21: mod_base = OTHER; note = 2'-O-methyladenosine
ccacctcgctccatgtgccta

SEQ ID NO: 1930 - RNA, 21 nt, synthetic construct
  source 1..21: mol_type = other RNA
  modified_base 1: mod_base = OTHER; note = 2'-O-methyluridine-3'-phosphorothioate
  modified_base 2: mod_base = OTHER; note = 2'-O-methylcytidine-3'-phosphorothioate
  modified_base 3: mod_base = OTHER; note = 2'-O-methylguanosine-3'-phosphate
  modified_base 4: mod_base = OTHER; note = 2'-O-methylcytidine-3'-phosphate
  modified_base 5: mod_base = OTHER; note = 2'-O-methyluridine-3'-phosphate
  modified_base 6: mod_base = OTHER; note = 2'-O-hexadecyl-cytidine-3'-phosphate
  modified_base 7: mod_base = OTHER; note = 2'-deoxy-2'-fluorocytidine-3'-phosphate
  modified_base 8: mod_base = OTHER; note = 2'-O-methyladenosine-3'-phosphate
  modified_base 9: mod_base = OTHER; note = 2'-deoxy-2'-fluorouridine-3'-phosphate
  modified_base 10: mod_base = OTHER; note = 2'-deoxy-2'-fluoroguanosine-3'-phosphate
  modified_base 11: mod_base = OTHER; note = 2'-deoxy-2'-fluorouridine-3'-phosphate
  modified_base 12: mod_base = OTHER; note = 2'-O-methylguanosine-3'-phosphate
  modified_base 13: mod_base = OTHER; note = 2'-O-methylcytidine-3'-phosphate
  modified_base 14: mod_base = OTHER; note = 2'-O-methylcytidine-3'-phosphate
  modified_base 15: mod_base = OTHER; note = 2'-O-methyluridine-3'-phosphate
  modified_base 16: mod_base = OTHER; note = 2'-O-methylcytidine-3'-phosphate
  modified_base 17: mod_base = OTHER; note = 2'-O-methyladenosine-3'-phosphate
  modified_base 18: mod_base = OTHER; note = 2'-O-methylcytidine-3'-phosphate
  modified_base 19: mod_base = OTHER; note = 2'-O-methyluridine-3'-phosphorothioate
  modified_base 20: mod_base = OTHER; note = 2'-O-methylcytidine-3'-phosphorothioate
  modified_base 21: mod_base = OTHER; note = 2'-O-methyladenosine
tcgctccatgtgcctcactca

SEQ ID NO: 1931 - RNA, 21 nt, synthetic construct
  source 1..21: mol_type = other RNA
  modified_base 1: mod_base = OTHER; note = 2'-O-methyladenosine-3'-phosphorothioate
  modified_base 2: mod_base = OTHER; note = 2'-O-methyluridine-3'-phosphorothioate
  modified_base 3: mod_base = OTHER; note = 2'-O-methylguanosine-3'-phosphate
  modified_base 4: mod_base = OTHER; note = 2'-O-methyluridine-3'-phosphate
  modified_base 5: mod_base = OTHER; note = 2'-O-methylguanosine-3'-phosphate
  modified_base 6: mod_base = OTHER; note = 2'-O-hexadecyl-cytidine-3'-phosphate
  modified_base 7: mod_base = OTHER; note = 2'-deoxy-2'-fluorocytidine-3'-phosphate
  modified_base 8: mod_base = OTHER; note = 2'-O-methyluridine-3'-phosphate
  modified_base 9: mod_base = OTHER; note = 2'-deoxy-2'-fluorocytidine-3'-phosphate
  modified_base 10: mod_base = OTHER; note = 2'-deoxy-2'-fluoroadenosine-3'-phosphate
  modified_base 11: mod_base = OTHER; note = 2'-deoxy-2'-fluorocytidine-3'-phosphate
  modified_base 12: mod_base = OTHER; note = 2'-O-methyluridine-3'-phosphate
  modified_base 13: mod_base = OTHER; note = 2'-O-methylcytidine-3'-phosphate
  modified_base 14: mod_base = OTHER; note = 2'-O-methyladenosine-3'-phosphate
  modified_base 15: mod_base = OTHER; note = 2'-O-methylcytidine-3'-phosphate
  modified_base 16: mod_base = OTHER; note = 2'-O-methyladenosine-3'-phosphate
  modified_base 17: mod_base = OTHER; note = 2'-O-methylguanosine-3'-phosphate
  modified_base 18: mod_base = OTHER; note = 2'-O-methylguanosine-3'-phosphate
  modified_base 19: mod_base = OTHER; note = 2'-O-methyladenosine-3'-phosphorothioate
  modified_base 20: mod_base = OTHER; note = 2'-O-methyladenosine-3'-phosphorothioate
  modified_base 21: mod_base = OTHER; note = 2'-O-methyladenosine
atgtgcctcactcacaggaaa

SEQ ID NO: 1932 - RNA, 21 nt, synthetic construct
  source 1..21: mol_type = other RNA
  modified_base 1: mod_base = OTHER; note = 2'-O-methylcytidine-3'-phosphorothioate
  modified_base 2: mod_base = OTHER; note = 2'-O-methylcytidine-3'-phosphorothioate
  modified_base 3: mod_base = OTHER; note = 2'-O-methyluridine-3'-phosphate
  modified_base 4: mod_base = OTHER; note = 2'-O-methylcytidine-3'-phosphate
  modified_base 5: mod_base = OTHER; note = 2'-O-methyladenosine-3'-phosphate
  modified_base 6: mod_base = OTHER; note = 2'-O-hexadecyl-cytidine-3'-phosphate
  modified_base 7: mod_base = OTHER; note = 2'-deoxy-2'-fluorouridine-3'-phosphate
  modified_base 8: mod_base = OTHER; note = 2'-O-methylcytidine-3'-phosphate
  modified_base 9: mod_base = OTHER; note = 2'-deoxy-2'-fluoroadenosine-3'-phosphate
  modified_base 10: mod_base = OTHER; note = 2'-deoxy-2'-fluorocytidine-3'-phosphate
  modified_base 11: mod_base = OTHER; note = 2'-deoxy-2'-fluoroadenosine-3'-phosphate
  modified_base 12: mod_base = OTHER; note = 2'-O-methylguanosine-3'-phosphate
  modified_base 13: mod_base = OTHER; note = 2'-O-methylguanosine-3'-phosphate
  modified_base 14: mod_base = OTHER; note = 2'-O-methyladenosine-3'-phosphate
  modified_base 15: mod_base = OTHER; note = 2'-O-methyladenosine-3'-phosphate
  modified_base 16: mod_base = OTHER; note = 2'-O-methylguanosine-3'-phosphate
  modified_base 17: mod_base = OTHER; note = 2'-O-methylguanosine-3'-phosphate
  modified_base 18: mod_base = OTHER; note = 2'-O-methyladenosine-3'-phosphate
  modified_base 19: mod_base = OTHER; note = 2'-O-methyladenosine-3'-phosphorothioate
  modified_base 20: mod_base = OTHER; note = 2'-O-methyladenosine-3'-phosphorothioate
  modified_base 21: mod_base = OTHER; note = 2'-O-methyladenosine
cctcactcacaggaaggaaaa

SEQ ID NO: 1933 - RNA, 21 nt, synthetic construct
  source 1..21: mol_type = other RNA
  modified_base 1: mod_base = OTHER; note = 2'-O-methyladenosine-3'-phosphorothioate
  modified_base 2: mod_base = OTHER; note = 2'-O-methylcytidine-3'-phosphorothioate
  modified_base 3: mod_base = OTHER; note = 2'-O-methyladenosine-3'-phosphate
  modified_base 4: mod_base = OTHER; note = 2'-O-methylguanosine-3'-phosphate
  modified_base 5: mod_base = OTHER; note = 2'-O-methylguanosine-3'-phosphate
  modified_base 6: mod_base = OTHER; note = 2'-O-hexadecyl-adenosine-3'-phosphate
  modified_base 7: mod_base = OTHER; note = 2'-deoxy-2'-fluoroadenosine-3'-phosphate
  modified_base 8: mod_base = OTHER; note = 2'-O-methylguanosine-3'-phosphate
  modified_base 9: mod_base = OTHER; note = 2'-deoxy-2'-fluoroguanosine-3'-phosphate
  modified_base 10: mod_base = OTHER; note = 2'-deoxy-2'-fluoroadenosine-3'-phosphate
  modified_base 11: mod_base = OTHER; note = 2'-deoxy-2'-fluoroadenosine-3'-phosphate
  modified_base 12: mod_base = OTHER; note = 2'-O-methyladenosine-3'-phosphate
  modified_base 13: mod_base = OTHER; note = 2'-O-methylcytidine-3'-phosphate
  modified_base 14: mod_base = OTHER; note = 2'-O-methyladenosine-3'-phosphate
  modified_base 15: mod_base = OTHER; note = 2'-O-methylguanosine-3'-phosphate
  modified_base 16: mod_base = OTHER; note = 2'-O-methylcytidine-3'-phosphate
  modified_base 17: mod_base = OTHER; note = 2'-O-methyladenosine-3'-phosphate
  modified_base 18: mod_base = OTHER; note = 2'-O-methylcytidine-3'-phosphate
  modified_base 19: mod_base = OTHER; note = 2'-O-methylcytidine-3'-phosphorothioate
  modified_base 20: mod_base = OTHER; note = 2'-O-methyluridine-3'-phosphorothioate
  modified_base 21: mod_base = OTHER; note = 2'-O-methyladenosine
acaggaaggaaacagcaccta

SEQ ID NO: 1934 - RNA, 21 nt, synthetic construct
  source 1..21: mol_type = other RNA
  modified_base 1: mod_base = OTHER; note = 2'-O-methyladenosine-3'-phosphorothioate
  modified_base 2: mod_base = OTHER; note = 2'-O-methyladenosine-3'-phosphorothioate
  modified_base 3: mod_base = OTHER; note = 2'-O-methylguanosine-3'-phosphate
  modified_base 4: mod_base = OTHER; note = 2'-O-methylguanosine-3'-phosphate
  modified_base 5: mod_base = OTHER; note = 2'-O-methyladenosine-3'-phosphate
  modified_base 6: mod_base = OTHER; note = 2'-O-hexadecyl-adenosine-3'-phosphate
  modified_base 7: mod_base = OTHER; note = 2'-deoxy-2'-fluoroadenosine-3'-phosphate
  modified_base 8: mod_base = OTHER; note = 2'-O-methylcytidine-3'-phosphate
  modified_base 9: mod_base = OTHER; note = 2'-deoxy-2'-fluoroadenosine-3'-phosphate
  modified_base 10: mod_base = OTHER; note = 2'-deoxy-2'-fluoroguanosine-3'-phosphate
  modified_base 11: mod_base = OTHER; note = 2'-deoxy-2'-fluorocytidine-3'-phosphate
  modified_base 12: mod_base = OTHER; note = 2'-O-methyladenosine-3'-phosphate
  modified_base 13: mod_base = OTHER; note = 2'-O-methylcytidine-3'-phosphate
  modified_base 14: mod_base = OTHER; note = 2'-O-methylcytidine-3'-phosphate
  modified_base 15: mod_base = OTHER; note = 2'-O-methyluridine-3'-phosphate
  modified_base 16: mod_base = OTHER; note = 2'-O-methylcytidine-3'-phosphate
  modified_base 17: mod_base = OTHER; note = 2'-O-methyluridine-3'-phosphate
  modified_base 18: mod_base = OTHER; note = 2'-O-methylcytidine-3'-phosphate
  modified_base 19: mod_base = OTHER; note = 2'-O-methyluridine-3'-phosphorothioate
  modified_base 20: mod_base = OTHER; note = 2'-O-methylcytidine-3'-phosphorothioate
  modified_base 21: mod_base = OTHER; note = 2'-O-methyladenosine
aaggaaacagcacctctctca

SEQ ID NO: 1935 - RNA, 21 nt, synthetic construct
  source 1..21: mol_type = other RNA
  modified_base 1: mod_base = OTHER; note = 2'-O-methylcytidine-3'-phosphorothioate
  modified_base 2: mod_base = OTHER; note = 2'-O-methyluridine-3'-phosphorothioate
  modified_base 3: mod_base = OTHER; note = 2'-O-methylcytidine-3'-phosphate
  modified_base 4: mod_base = OTHER; note = 2'-O-methyluridine-3'-phosphate
  modified_base 5: mod_base = OTHER; note = 2'-O-methylcytidine-3'-phosphate
  modified_base 6: mod_base = OTHER; note = 2'-O-hexadecyl-cytidine-3'-phosphate
  modified_base 7: mod_base = OTHER; note = 2'-deoxy-2'-fluoroadenosine-3'-phosphate
  modified_base 8: mod_base = OTHER; note = 2'-O-methylguanosine-3'-phosphate
  modified_base 9: mod_base = OTHER; note = 2'-deoxy-2'-fluoroguanosine-3'-phosphate
  modified_base 10: mod_base = OTHER; note = 2'-deoxy-2'-fluoroadenosine-3'-phosphate
  modified_base 11: mod_base = OTHER; note = 2'-deoxy-2'-fluoroguanosine-3'-phosphate
  modified_base 12: mod_base = OTHER; note = 2'-O-methylguanosine-3'-phosphate
  modified_base 13: mod_base = OTHER; note = 2'-O-methylguanosine-3'-phosphate
  modified_base 14: mod_base = OTHER; note = 2'-O-methyluridine-3'-phosphate
  modified_base 15: mod_base = OTHER; note = 2'-O-methylcytidine-3'-phosphate
  modified_base 16: mod_base = OTHER; note = 2'-O-methyluridine-3'-phosphate
  modified_base 17: mod_base = OTHER; note = 2'-O-methyluridine-3'-phosphate
  modified_base 18: mod_base = OTHER; note = 2'-O-methylcytidine-3'-phosphate
  modified_base 19: mod_base = OTHER; note = 2'-O-methyladenosine-3'-phosphorothioate
  modified_base 20: mod_base = OTHER; note = 2'-O-methylguanosine-3'-phosphorothioate
  modified_base 21: mod_base = OTHER; note = 2'-O-methyladenosine
ctctccaggagggtcttcaga

SEQ ID NO: 1936 - RNA, 21 nt, synthetic construct
  source 1..21: mol_type = other RNA
  modified_base 1: mod_base = OTHER; note = 2'-O-methylcytidine-3'-phosphorothioate
  modified_base 2: mod_base = OTHER; note = 2'-O-methyladenosine-3'-phosphorothioate
  modified_base 3: mod_base = OTHER; note = 2'-O-methylguanosine-3'-phosphate
  modified_base 4: mod_base = OTHER; note = 2'-O-methylguanosine-3'-phosphate
  modified_base 5: mod_base = OTHER; note = 2'-O-methyladenosine-3'-phosphate
  modified_base 6: mod_base = OTHER; note = 2'-O-hexadecyl-guanosine-3'-phosphate
  modified_base 7: mod_base = OTHER; note = 2'-deoxy-2'-fluoroguanosine-3'-phosphate
  modified_base 8: mod_base = OTHER; note = 2'-O-methylguanosine-3'-phosphate
  modified_base 9: mod_base = OTHER; note = 2'-deoxy-2'-fluorouridine-3'-phosphate
  modified_base 10: mod_base = OTHER; note = 2'-deoxy-2'-fluorocytidine-3'-phosphate
  modified_base 11: mod_base = OTHER; note = 2'-deoxy-2'-fluorouridine-3'-phosphate
  modified_base 12: mod_base = OTHER; note = 2'-O-methyluridine-3'-phosphate
  modified_base 13: mod_base = OTHER; note = 2'-O-methylcytidine-3'-phosphate
  modified_base 14: mod_base = OTHER; note = 2'-O-methyladenosine-3'-phosphate
  modified_base 15: mod_base = OTHER; note = 2'-O-methylguanosine-3'-phosphate
  modified_base 16: mod_base = OTHER; note = 2'-O-methylguanosine-3'-phosphate
  modified_base 17: mod_base = OTHER; note = 2'-O-methyladenosine-3'-phosphate
  modified_base 18: mod_base = OTHER; note = 2'-O-methyluridine-3'-phosphate
  modified_base 19: mod_base = OTHER; note = 2'-O-methylcytidine-3'-phosphorothioate
  modified_base 20: mod_base = OTHER; note = 2'-O-methyluridine-3'-phosphorothioate
  modified_base 21: mod_base = OTHER; note = 2'-O-methyladenosine
caggagggtcttcaggatcta

SEQ ID NO: 1937 - RNA, 21 nt, synthetic construct
  source 1..21: mol_type = other RNA
  modified_base 1: mod_base = OTHER; note = 2'-O-methylguanosine-3'-phosphorothioate
  modified_base 2: mod_base = OTHER; note = 2'-O-methylguanosine-3'-phosphorothioate
  modified_base 3: mod_base = OTHER; note = 2'-O-methyluridine-3'-phosphate
  modified_base 4: mod_base = OTHER; note = 2'-O-methylcytidine-3'-phosphate
  modified_base 5: mod_base = OTHER; note = 2'-O-methyluridine-3'-phosphate
  modified_base 6: mod_base = OTHER; note = 2'-O-hexadecyl-uridine-3'-phosphate
  modified_base 7: mod_base = OTHER; note = 2'-deoxy-2'-fluorocytidine-3'-phosphate
  modified_base 8: mod_base = OTHER; note = 2'-O-methyladenosine-3'-phosphate
  modified_base 9: mod_base = OTHER; note = 2'-deoxy-2'-fluoroguanosine-3'-phosphate
  modified_base 10: mod_base = OTHER; note = 2'-deoxy-2'-fluoroguanosine-3'-phosphate
  modified_base 11: mod_base = OTHER; note = 2'-deoxy-2'-fluoroadenosine-3'-phosphate
  modified_base 12: mod_base = OTHER; note = 2'-O-methyluridine-3'-phosphate
  modified_base 13: mod_base = OTHER; note = 2'-O-methylcytidine-3'-phosphate
  modified_base 14: mod_base = OTHER; note = 2'-O-methyluridine-3'-phosphate
  modified_base 15: mod_base = OTHER; note = 2'-O-methylcytidine-3'-phosphate
  modified_base 16: mod_base = OTHER; note = 2'-O-methyladenosine-3'-phosphate
  modified_base 17: mod_base = OTHER; note = 2'-O-methyluridine-3'-phosphate
  modified_base 18: mod_base = OTHER; note = 2'-O-methylcytidine-3'-phosphate
  modified_base 19: mod_base = OTHER; note = 2'-O-methylcytidine-3'-phosphorothioate
  modified_base 20: mod_base = OTHER; note = 2'-O-methyladenosine-3'-phosphorothioate
  modified_base 21: mod_base = OTHER; note = 2'-O-methyladenosine
ggtcttcaggatctcatccaa

SEQ ID NO: 1938 - RNA, 21 nt, synthetic construct
  source 1..21: mol_type = other RNA
  modified_base 1: mod_base = OTHER; note = 2'-O-methyluridine-3'-phosphorothioate
  modified_base 2: mod_base = OTHER; note = 2'-O-methylcytidine-3'-phosphorothioate
  modified_base 3: mod_base = OTHER; note = 2'-O-methyladenosine-3'-phosphate
  modified_base 4: mod_base = OTHER; note = 2'-O-methylguanosine-3'-phosphate
  modified_base 5: mod_base = OTHER; note = 2'-O-methylguanosine-3'-phosphate
  modified_base 6: mod_base = OTHER; note = 2'-O-hexadecyl-adenosine-3'-phosphate
  modified_base 7: mod_base = OTHER; note = 2'-deoxy-2'-fluorouridine-3'-phosphate
  modified_base 8: mod_base = OTHER; note = 2'-O-methylcytidine-3'-phosphate
  modified_base 9: mod_base = OTHER; note = 2'-deoxy-2'-fluorouridine-3'-phosphate
  modified_base 10: mod_base = OTHER; note = 2'-deoxy-2'-fluorocytidine-3'-phosphate
  modified_base 11: mod_base = OTHER; note = 2'-deoxy-2'-fluoroadenosine-3'-phosphate
  modified_base 12: mod_base = OTHER; note = 2'-O-methyluridine-3'-phosphate
  modified_base 13: mod_base = OTHER; note = 2'-O-methylcytidine-3'-phosphate
  modified_base 14: mod_base = OTHER; note = 2'-O-methylcytidine-3'-phosphate
  modified_base 15: mod_base = OTHER; note = 2'-O-methyladenosine-3'-phosphate
  modified_base 16: mod_base = OTHER; note = 2'-O-methylcytidine-3'-phosphate
  modified_base 17: mod_base = OTHER; note = 2'-O-methyladenosine-3'-phosphate
  modified_base 18: mod_base = OTHER; note = 2'-O-methylcytidine-3'-phosphate
  modified_base 19: mod_base = OTHER; note = 2'-O-methyladenosine-3'-phosphorothioate
  modified_base 20: mod_base = OTHER; note = 2'-O-methylguanosine-3'-phosphorothioate
  modified_base 21: mod_base = OTHER; note = 2'-O-methyladenosine
tcaggatctcatccacacaga

SEQ ID NO: 1939 - RNA, 21 nt, synthetic construct
  source 1..21: mol_type = other RNA
  modified_base 1: mod_base = OTHER; note = 2'-O-methyluridine-3'-phosphorothioate
  modified_base 2: mod_base = OTHER; note = 2'-O-methylcytidine-3'-phosphorothioate
  modified_base 3: mod_base = OTHER; note = 2'-O-methyladenosine-3'-phosphate
  modified_base 4: mod_base = OTHER; note = 2'-O-methyluridine-3'-phosphate
  modified_base 5: mod_base = OTHER; note = 2'-O-methylcytidine-3'-phosphate
  modified_base 6: mod_base = OTHER; note = 2'-O-hexadecyl-cytidine-3'-phosphate
  modified_base 7: mod_base = OTHER; note = 2'-deoxy-2'-fluoroadenosine-3'-phosphate
  modified_base 8: mod_base = OTHER; note = 2'-O-methylcytidine-3'-phosphate
  modified_base 9: mod_base = OTHER; note = 2'-deoxy-2'-fluoroadenosine-3'-phosphate
  modified_base 10: mod_base = OTHER; note = 2'-deoxy-2'-fluorocytidine-3'-phosphate
  modified_base 11: mod_base = OTHER; note = 2'-deoxy-2'-fluoroadenosine-3'-phosphate
  modified_base 12: mod_base = OTHER; note = 2'-O-methylguanosine-3'-phosphate
  modified_base 13: mod_base = OTHER; note = 2'-O-methylcytidine-3'-phosphate
  modified_base 14: mod_base = OTHER; note = 2'-O-methylcytidine-3'-phosphate
  modified_base 15: mod_base = OTHER; note = 2'-O-methyladenosine-3'-phosphate
  modified_base 16: mod_base = OTHER; note = 2'-O-methylcytidine-3'-phosphate
  modified_base 17: mod_base = OTHER; note = 2'-O-methylcytidine-3'-phosphate
  modified_base 18: mod_base = OTHER; note = 2'-O-methyluridine-3'-phosphate
  modified_base 19: mod_base = OTHER; note = 2'-O-methyluridine-3'-phosphorothioate
  modified_base 20: mod_base = OTHER; note = 2'-O-methylguanosine-3'-phosphorothioate
  modified_base 21: mod_base = OTHER; note = 2'-O-methyladenosine
tcatccacacagccaccttga

SEQ ID NO: 1940 - RNA, 21 nt, synthetic construct
  source 1..21: mol_type = other RNA
  modified_base 1: mod_base = OTHER; note = 2'-O-methylcytidine-3'-phosphorothioate
  modified_base 2: mod_base = OTHER; note = 2'-O-methyladenosine-3'-phosphorothioate
  modified_base 3: mod_base = OTHER; note = 2'-O-methylcytidine-3'-phosphate
  modified_base 4: mod_base = OTHER; note = 2'-O-methyladenosine-3'-phosphate
  modified_base 5: mod_base = OTHER; note = 2'-O-methylcytidine-3'-phosphate
  modified_base 6: mod_base = OTHER; note = 2'-O-hexadecyl-adenosine-3'-phosphate
  modified_base 7: mod_base = OTHER; note = 2'-deoxy-2'-fluoroguanosine-3'-phosphate
  modified_base 8: mod_base = OTHER; note = 2'-O-methylcytidine-3'-phosphate
  modified_base 9: mod_base = OTHER; note = 2'-deoxy-2'-fluorocytidine-3'-phosphate
  modified_base 10: mod_base = OTHER; note = 2'-deoxy-2'-fluoroadenosine-3'-phosphate
  modified_base 11: mod_base = OTHER; note = 2'-deoxy-2'-fluorocytidine-3'-phosphate
  modified_base 12: mod_base = OTHER; note = 2'-O-methylcytidine-3'-phosphate
  modified_base 13: mod_base = OTHER; note = 2'-O-methyluridine-3'-phosphate
  modified_base 14: mod_base = OTHER; note = 2'-O-methyluridine-3'-phosphate
  modified_base 15: mod_base = OTHER; note = 2'-O-methylguanosine-3'-phosphate
  modified_base 16: mod_base = OTHER; note = 2'-O-methylguanosine-3'-phosphate
  modified_base 17: mod_base = OTHER; note = 2'-O-methyluridine-3'-phosphate
  modified_base 18: mod_base = OTHER; note = 2'-O-methylguanosine-3'-phosphate
  modified_base 19: mod_base = OTHER; note = 2'-O-methyladenosine-3'-phosphorothioate
  modified_base 20: mod_base = OTHER; note = 2'-O-methylcytidine-3'-phosphorothioate
  modified_base 21: mod_base = OTHER; note = 2'-O-methyladenosine
cacacagccaccttggtgaca

SEQ ID NO: 1941 - RNA, 21 nt, synthetic construct
  source 1..21: mol_type = other RNA
  modified_base 1: mod_base = OTHER; note = 2'-O-methyladenosine-3'-phosphorothioate
  modified_base 2: mod_base = OTHER; note = 2'-O-methylguanosine-3'-phosphorothioate
  modified_base 3: mod_base = OTHER; note = 2'-O-methylcytidine-3'-phosphate
  modified_base 4: mod_base = OTHER; note = 2'-O-methylcytidine-3'-phosphate
  modified_base 5: mod_base = OTHER; note = 2'-O-methyladenosine-3'-phosphate
  modified_base 6: mod_base = OTHER; note = 2'-O-hexadecyl-cytidine-3'-phosphate
  modified_base 7: mod_base = OTHER; note = 2'-deoxy-2'-fluorocytidine-3'-phosphate
  modified_base 8: mod_base = OTHER; note = 2'-O-methyluridine-3'-phosphate
  modified_base 9: mod_base = OTHER; note = 2'-deoxy-2'-fluorouridine-3'-phosphate
  modified_base 10: mod_base = OTHER; note = 2'-deoxy-2'-fluoroguanosine-3'-phosphate
  modified_base 11: mod_base = OTHER; note = 2'-deoxy-2'-fluoroguanosine-3'-phosphate
  modified_base 12: mod_base = OTHER; note = 2'-O-methyluridine-3'-phosphate
  modified_base 13: mod_base = OTHER; note = 2'-O-methylguanosine-3'-phosphate
  modified_base 14: mod_base = OTHER; note = 2'-O-methyladenosine-3'-phosphate
  modified_base 15: mod_base = OTHER; note = 2'-O-methylcytidine-3'-phosphate
  modified_base 16: mod_base = OTHER; note = 2'-O-methylcytidine-3'-phosphate
  modified_base 17: mod_base = OTHER; note = 2'-O-methyluridine-3'-phosphate
  modified_base 18: mod_base = OTHER; note = 2'-O-methylguanosine-3'-phosphate
  modified_base 19: mod_base = OTHER; note = 2'-O-methyluridine-3'-phosphorothioate
  modified_base 20: mod_base = OTHER; note = 2'-O-methyladenosine-3'-phosphorothioate
  modified_base 21: mod_base = OTHER; note = 2'-O-methyladenosine
agccaccttggtgacctgtaa

SEQ ID NO: 1942 - RNA, 21 nt, synthetic construct
  source 1..21: mol_type = other RNA
  modified_base 1: mod_base = OTHER; note = 2'-O-methylcytidine-3'-phosphorothioate
  modified_base 2: mod_base = OTHER; note = 2'-O-methylcytidine-3'-phosphorothioate
  modified_base 3: mod_base = OTHER; note = 2'-O-methyluridine-3'-phosphate
  modified_base 4: mod_base = OTHER; note = 2'-O-methyluridine-3'-phosphate
  modified_base 5: mod_base = OTHER; note = 2'-O-methylguanosine-3'-phosphate
  modified_base 6: mod_base = OTHER; note = 2'-O-hexadecyl-guanosine-3'-phosphate
  modified_base 7: mod_base = OTHER; note = 2'-deoxy-2'-fluorouridine-3'-phosphate
  modified_base 8: mod_base = OTHER; note = 2'-O-methylguanosine-3'-phosphate
  modified_base 9: mod_base = OTHER; note = 2'-deoxy-2'-fluoroadenosine-3'-phosphate
  modified_base 10: mod_base = OTHER; note = 2'-deoxy-2'-fluorocytidine-3'-phosphate
  modified_base 11: mod_base = OTHER; note = 2'-deoxy-2'-fluorocytidine-3'-phosphate
  modified_base 12: mod_base = OTHER; note = 2'-O-methyluridine-3'-phosphate
  modified_base 13: mod_base = OTHER; note = 2'-O-methylguanosine-3'-phosphate
  modified_base 14: mod_base = OTHER; note = 2'-O-methyluridine-3'-phosphate
  modified_base 15: mod_base = OTHER; note = 2'-O-methyladenosine-3'-phosphate
  modified_base 16: mod_base = OTHER; note = 2'-O-methylcytidine-3'-phosphate
  modified_base 17: mod_base = OTHER; note = 2'-O-methyluridine-3'-phosphate
  modified_base 18: mod_base = OTHER; note = 2'-O-methyluridine-3'-phosphate
  modified_base 19: mod_base = OTHER; note = 2'-O-methyluridine-3'-phosphorothioate
  modified_base 20: mod_base = OTHER; note = 2'-O-methyluridine-3'-phosphorothioate
  modified_base 21: mod_base = OTHER; note = 2'-O-methyladenosine
ccttggtgacctgtactttta

SEQ ID NO: 1943 - RNA, 21 nt, synthetic construct
  source 1..21: mol_type = other RNA
  modified_base 1: mod_base = OTHER; note = 2'-O-methylguanosine-3'-phosphorothioate
  modified_base 2: mod_base = OTHER; note = 2'-O-methyluridine-3'-phosphorothioate
  modified_base 3: mod_base = OTHER; note = 2'-O-methylguanosine-3'-phosphate
  modified_base 4: mod_base = OTHER; note = 2'-O-methyladenosine-3'-phosphate
  modified_base 5: mod_base = OTHER; note = 2'-O-methylcytidine-3'-phosphate
  modified_base 6: mod_base = OTHER; note = 2'-O-hexadecyl-cytidine-3'-phosphate
  modified_base 7: mod_base = OTHER; note = 2'-deoxy-2'-fluorouridine-3'-phosphate
  modified_base 8: mod_base = OTHER; note = 2'-O-methylguanosine-3'-phosphate
  modified_base 9: mod_base = OTHER; note = 2'-deoxy-2'-fluorouridine-3'-phosphate
  modified_base 10: mod_base = OTHER; note = 2'-deoxy-2'-fluoroadenosine-3'-phosphate
  modified_base 11: mod_base = OTHER; note = 2'-deoxy-2'-fluorocytidine-3'-phosphate
  modified_base 12: mod_base = OTHER; note = 2'-O-methyluridine-3'-phosphate
  modified_base 13: mod_base = OTHER; note = 2'-O-methyluridine-3'-phosphate
  modified_base 14: mod_base = OTHER; note = 2'-O-methyluridine-3'-phosphate
  modified_base 15: mod_base = OTHER; note = 2'-O-methyluridine-3'-phosphate
  modified_base 16: mod_base = OTHER; note = 2'-O-methylcytidine-3'-phosphate
  modified_base 17: mod_base = OTHER; note = 2'-O-methyluridine-3'-phosphate
  modified_base 18: mod_base = OTHER; note = 2'-O-methyladenosine-3'-phosphate
  modified_base 19: mod_base = OTHER; note = 2'-O-methylcytidine-3'-phosphorothioate
  modified_base 20: mod_base = OTHER; note = 2'-O-methyluridine-3'-phosphorothioate
  modified_base 21: mod_base = OTHER; note = 2'-O-methyladenosine
gtgacctgtacttttctacta

SEQ ID NO: 1944 - RNA, 21 nt, synthetic construct
  source 1..21: mol_type = other RNA
  modified_base 1: mod_base = OTHER; note = 2'-O-methyladenosine-3'-phosphorothioate
  modified_base 2: mod_base = OTHER; note = 2'-O-methylcytidine-3'-phosphorothioate
  modified_base 3: mod_base = OTHER; note = 2'-O-methyluridine-3'-phosphate
  modified_base 4: mod_base = OTHER; note = 2'-O-methyluridine-3'-phosphate
  modified_base 5: mod_base = OTHER; note = 2'-O-methyluridine-3'-phosphate
  modified_base 6: mod_base = OTHER; note = 2'-O-hexadecyl-uridine-3'-phosphate
  modified_base 7: mod_base = OTHER; note = 2'-deoxy-2'-fluorocytidine-3'-phosphate
  modified_base 8: mod_base = OTHER; note = 2'-O-methyluridine-3'-phosphate
  modified_base 9: mod_base = OTHER; note = 2'-deoxy-2'-fluoroadenosine-3'-phosphate
  modified_base 10: mod_base = OTHER; note = 2'-deoxy-2'-fluorocytidine-3'-phosphate
  modified_base 11: mod_base = OTHER; note = 2'-deoxy-2'-fluorouridine-3'-phosphate
  modified_base 12: mod_base = OTHER; note = 2'-O-methylguanosine-3'-phosphate
  modified_base 13: mod_base = OTHER; note = 2'-O-methylguanosine-3'-phosphate
  modified_base 14: mod_base = OTHER; note = 2'-O-methylcytidine-3'-phosphate
  modified_base 15: mod_base = OTHER; note = 2'-O-methylguanosine-3'-phosphate
  modified_base 16: mod_base = OTHER; note = 2'-O-methylguanosine-3'-phosphate
  modified_base 17: mod_base = OTHER; note = 2'-O-methyluridine-3'-phosphate
  modified_base 18: mod_base = OTHER; note = 2'-O-methylcytidine-3'-phosphate
  modified_base 19: mod_base = OTHER; note = 2'-O-methyladenosine-3'-phosphorothioate
  modified_base 20: mod_base = OTHER; note = 2'-O-methyluridine-3'-phosphorothioate
  modified_base 21: mod_base = OTHER; note = 2'-O-methyladenosine
acttttctactggcggtcata

SEQ ID NO: 1945 - RNA, 21 nt, synthetic construct
  source 1..21: mol_type = other RNA
  modified_base 1: mod_base = OTHER; note = 2'-O-methyluridine-3'-phosphorothioate
  modified_base 2: mod_base = OTHER; note = 2'-O-methylcytidine-3'-phosphorothioate
  modified_base 3: mod_base = OTHER; note = 2'-O-methyluridine-3'-phosphate
  modified_base 4: mod_base = OTHER; note = 2'-O-methyladenosine-3'-phosphate
  modified_base 5: mod_base = OTHER; note = 2'-O-methylcytidine-3'-phosphate
  modified_base 6: mod_base = OTHER; note = 2'-O-hexadecyl-uridine-3'-phosphate
  modified_base 7: mod_base = OTHER; note = 2'-deoxy-2'-fluoroguanosine-3'-phosphate
  modified_base 8: mod_base = OTHER; note = 2'-O-methylguanosine-3'-phosphate
  modified_base 9: mod_base = OTHER; note = 2'-deoxy-2'-fluorocytidine-3'-phosphate
  modified_base 10: mod_base = OTHER; note = 2'-deoxy-2'-fluoroguanosine-3'-phosphate
  modified_base 11: mod_base = OTHER; note = 2'-deoxy-2'-fluoroguanosine-3'-phosphate
  modified_base 12: mod_base = OTHER; note = 2'-O-methyluridine-3'-phosphate
  modified_base 13: mod_base = OTHER; note = 2'-O-methylcytidine-3'-phosphate
  modified_base 14: mod_base = OTHER; note = 2'-O-methyladenosine-3'-phosphate
  modified_base 15: mod_base = OTHER; note = 2'-O-methyluridine-3'-phosphate
  modified_base 16: mod_base = OTHER; note = 2'-O-methylcytidine-3'-phosphate
  modified_base 17: mod_base = OTHER; note = 2'-O-methyluridine-3'-phosphate
  modified_base 18: mod_base = OTHER; note = 2'-O-methyluridine-3'-phosphate
  modified_base 19: mod_base = OTHER; note = 2'-O-methylcytidine-3'-phosphorothioate
  modified_base 20: mod_base = OTHER; note = 2'-O-methyluridine-3'-phosphorothioate
  modified_base 21: mod_base = OTHER; note = 2'-O-methyladenosine
tctactggcggtcatcttcta

SEQ ID NO: 1946 - RNA, 21 nt, synthetic construct
  source 1..21: mol_type = other RNA
  modified_base 1: mod_base = OTHER; note = 2'-O-methylguanosine-3'-phosphorothioate
  modified_base 2: mod_base = OTHER; note = 2'-O-methylguanosine-3'-phosphorothioate
  modified_base 3: mod_base = OTHER; note = 2'-O-methyluridine-3'-phosphate
  modified_base 4: mod_base = OTHER; note = 2'-O-methylcytidine-3'-phosphate
  modified_base 5: mod_base = OTHER; note = 2'-O-methyladenosine-3'-phosphate
  modified_base 6: mod_base = OTHER; note = 2'-O-hexadecyl-uridine-3'-phosphate
  modified_base 7: mod_base = OTHER; note = 2'-deoxy-2'-fluorocytidine-3'-phosphate
  modified_base 8: mod_base = OTHER; note = 2'-O-methyluridine-3'-phosphate
  modified_base 9: mod_base = OTHER; note = 2'-deoxy-2'-fluorouridine-3'-phosphate
  modified_base 10: mod_base = OTHER; note = 2'-deoxy-2'-fluorocytidine-3'-phosphate
  modified_base 11: mod_base = OTHER; note = 2'-deoxy-2'-fluorouridine-3'-phosphate
  modified_base 12: mod_base = OTHER; note = 2'-O-methylguanosine-3'-phosphate
  modified_base 13: mod_base = OTHER; note = 2'-O-methylcytidine-3'-phosphate
  modified_base 14: mod_base = OTHER; note = 2'-O-methylcytidine-3'-phosphate
  modified_base 15: mod_base = OTHER; note = 2'-O-methyluridine-3'-phosphate
  modified_base 16: mod_base = OTHER; note = 2'-O-methylguanosine-3'-phosphate
  modified_base 17: mod_base = OTHER; note = 2'-O-methylguanosine-3'-phosphate
  modified_base 18: mod_base = OTHER; note = 2'-O-methylguanosine-3'-phosphate
  modified_base 19: mod_base = OTHER; note = 2'-O-methyluridine-3'-phosphorothioate
  modified_base 20: mod_base = OTHER; note = 2'-O-methyluridine-3'-phosphorothioate
  modified_base 21: mod_base = OTHER; note = 2'-O-methyladenosine
ggtcatcttctgcctgggtta

SEQ ID NO: 1947 - RNA, 21 nt, synthetic construct
  source 1..21: mol_type = other RNA
  modified_base 1: mod_base = OTHER; note = 2'-O-methyluridine-3'-phosphorothioate
  modified_base 2: mod_base = OTHER; note = 2'-O-methyluridine-3'-phosphorothioate
  modified_base 3: mod_base = OTHER; note = 2'-O-methylcytidine-3'-phosphate
  modified_base 4: mod_base = OTHER; note = 2'-O-methyluridine-3'-phosphate
  modified_base 5: mod_base = OTHER; note = 2'-O-methylguanosine-3'-phosphate
  modified_base 6: mod_base = OTHER; note = 2'-O-hexadecyl-cytidine-3'-phosphate
  modified_base 7: mod_base = OTHER; note = 2'-deoxy-2'-fluorocytidine-3'-phosphate
  modified_base 8: mod_base = OTHER; note = 2'-O-methyluridine-3'-phosphate
  modified_base 9: mod_base = OTHER; note = 2'-deoxy-2'-fluoroguanosine-3'-phosphate
  modified_base 10: mod_base = OTHER; note = 2'-deoxy-2'-fluoroguanosine-3'-phosphate
  modified_base 11: mod_base = OTHER; note = 2'-deoxy-2'-fluoroguanosine-3'-phosphate
  modified_base 12: mod_base = OTHER; note = 2'-O-methyluridine-3'-phosphate
  modified_base 13: mod_base = OTHER; note = 2'-O-methyluridine-3'-phosphate
  modified_base 14: mod_base = OTHER; note = 2'-O-methylcytidine-3'-phosphate
  modified_base 15: mod_base = OTHER; note = 2'-O-methylcytidine-3'-phosphate
  modified_base 16: mod_base = OTHER; note = 2'-O-methyluridine-3'-phosphate
  modified_base 17: mod_base = OTHER; note = 2'-O-methyladenosine-3'-phosphate
  modified_base 18: mod_base = OTHER; note = 2'-O-methyluridine-3'-phosphate
  modified_base 19: mod_base = OTHER; note = 2'-O-methylguanosine-3'-phosphorothioate
  modified_base 20: mod_base = OTHER; note = 2'-O-methylguanosine-3'-phosphorothioate
  modified_base 21: mod_base = OTHER; note = 2'-O-methyladenosine
ttctgcctgggttcctatgga

SEQ ID NO: 1948 - RNA, 21 nt, synthetic construct
  source 1..21: mol_type = other RNA
  modified_base 1: mod_base = OTHER; note = 2'-O-methylcytidine-3'-phosphorothioate
  modified_base 2: mod_base = OTHER; note = 2'-O-methylcytidine-3'-phosphorothioate
  modified_base 3: mod_base = OTHER; note = 2'-O-methyluridine-3'-phosphate
  modified_base 4: mod_base = OTHER; note = 2'-O-methylguanosine-3'-phosphate
  modified_base 5: mod_base = OTHER; note = 2'-O-methylguanosine-3'-phosphate
  modified_base 6: mod_base = OTHER; note = 2'-O-hexadecyl-guanosine-3'-phosphate
  modified_base 7: mod_base = OTHER; note = 2'-deoxy-2'-fluorouridine-3'-phosphate
  modified_base 8: mod_base = OTHER; note = 2'-O-methyluridine-3'-phosphate
  modified_base 9: mod_base = OTHER; note = 2'-deoxy-2'-fluorocytidine-3'-phosphate
  modified_base 10: mod_base = OTHER; note = 2'-deoxy-2'-fluorocytidine-3'-phosphate
  modified_base 11: mod_base = OTHER; note = 2'-deoxy-2'-fluorouridine-3'-phosphate
  modified_base 12: mod_base = OTHER; note = 2'-O-methyladenosine-3'-phosphate
  modified_base 13: mod_base = OTHER; note = 2'-O-methyluridine-3'-phosphate
  modified_base 14: mod_base = OTHER; note = 2'-O-methylguanosine-3'-phosphate
  modified_base 15: mod_base = OTHER; note = 2'-O-methylguanosine-3'-phosphate
  modified_base 16: mod_base = OTHER; note = 2'-O-methylcytidine-3'-phosphate
  modified_base 17: mod_base = OTHER; note = 2'-O-methyladenosine-3'-phosphate
  modified_base 18: mod_base = OTHER; note = 2'-O-methyladenosine-3'-phosphate
  modified_base 19: mod_base = OTHER; note = 2'-O-methylcytidine-3'-phosphorothioate
  modified_base 20: mod_base = OTHER; note = 2'-O-methyluridine-3'-phosphorothioate
  modified_base 21: mod_base = OTHER; note = 2'-O-methyladenosine
cctgggttcctatggcaacta

SEQ ID NO: 1949 - RNA, 21 nt, synthetic construct
  source 1..21: mol_type = other RNA
  modified_base 1: mod_base = OTHER; note = 2'-O-methylguanosine-3'-phosphorothioate
  modified_base 2: mod_base = OTHER; note = 2'-O-methyluridine-3'-phosphorothioate
  modified_base 3: mod_base = OTHER; note = 2'-O-methyluridine-3'-phosphate
  modified_base 4: mod_base = OTHER; note = 2'-O-methylcytidine-3'-phosphate
  modified_base 5: mod_base = OTHER; note = 2'-O-methylcytidine-3'-phosphate
  modified_base 6: mod_base = OTHER; note = 2'-O-hexadecyl-uridine-3'-phosphate
  modified_base 7: mod_base = OTHER; note = 2'-deoxy-2'-fluoroadenosine-3'-phosphate
  modified_base 8: mod_base = OTHER; note = 2'-O-methyluridine-3'-phosphate
  modified_base 9: mod_base = OTHER; note = 2'-deoxy-2'-fluoroguanosine-3'-phosphate
  modified_base 10: mod_base = OTHER; note = 2'-deoxy-2'-fluoroguanosine-3'-phosphate
  modified_base 11: mod_base = OTHER; note = 2'-deoxy-2'-fluorocytidine-3'-phosphate
  modified_base 12: mod_base = OTHER; note = 2'-O-methyladenosine-3'-phosphate
  modified_base 13: mod_base = OTHER; note = 2'-O-methyladenosine-3'-phosphate
  modified_base 14: mod_base = OTHER; note = 2'-O-methylcytidine-3'-phosphate
  modified_base 15: mod_base = OTHER; note = 2'-O-methyluridine-3'-phosphate
  modified_base 16: mod_base = OTHER; note = 2'-O-methyluridine-3'-phosphate
  modified_base 17: mod_base = OTHER; note = 2'-O-methylcytidine-3'-phosphate
  modified_base 18: mod_base = OTHER; note = 2'-O-methyladenosine-3'-phosphate
  modified_base 19: mod_base = OTHER; note = 2'-O-methyluridine-3'-phosphorothioate
  modified_base 20: mod_base = OTHER; note = 2'-O-methyluridine-3'-phosphorothioate
  modified_base 21: mod_base = OTHER; note = 2'-O-methyladenosine
gttcctatggcaacttcatta

SEQ ID NO: 1950 - RNA, 21 nt, synthetic construct
  source 1..21: mol_type = other RNA
  modified_base 1: mod_base = OTHER; note = 2'-O-methyluridine-3'-phosphorothioate
  modified_base 2: mod_base = OTHER; note = 2'-O-methyladenosine-3'-phosphorothioate
  modified_base 3: mod_base = OTHER; note = 2'-O-methyluridine-3'-phosphate
  modified_base 4: mod_base = OTHER; note = 2'-O-methylguanosine-3'-phosphate
  modified_base 5: mod_base = OTHER; note = 2'-O-methylguanosine-3'-phosphate
  modified_base 6: mod_base = OTHER; note = 2'-O-hexadecyl-cytidine-3'-phosphate
  modified_base 7: mod_base = OTHER; note = 2'-deoxy-2'-fluoroadenosine-3'-phosphate
  modified_base 8: mod_base = OTHER; note = 2'-O-methyladenosine-3'-phosphate
  modified_base 9: mod_base = OTHER; note = 2'-deoxy-2'-fluorocytidine-3'-phosphate
  modified_base 10: mod_base = OTHER; note = 2'-deoxy-2'-fluorouridine-3'-phosphate
  modified_base 11: mod_base = OTHER; note = 2'-deoxy-2'-fluorouridine-3'-phosphate
  modified_base 12: mod_base = OTHER; note = 2'-O-methylcytidine-3'-phosphate
  modified_base 13: mod_base = OTHER; note = 2'-O-methyladenosine-3'-phosphate
  modified_base 14: mod_base = OTHER; note = 2'-O-methyluridine-3'-phosphate
  modified_base 15: mod_base = OTHER; note = 2'-O-methyluridine-3'-phosphate
  modified_base 16: mod_base = OTHER; note = 2'-O-methylguanosine-3'-phosphate
  modified_base 17: mod_base = OTHER; note = 2'-O-methyluridine-3'-phosphate
  modified_base 18: mod_base = OTHER; note = 2'-O-methylcytidine-3'-phosphate
  modified_base 19: mod_base = OTHER; note = 2'-O-methyluridine-3'-phosphorothioate
  modified_base 20: mod_base = OTHER; note = 2'-O-methyluridine-3'-phosphorothioate
  modified_base 21: mod_base = OTHER; note = 2'-O-methyladenosine
tatggcaacttcattgtctta

SEQ ID NO: 1951 - RNA, 21 nt, synthetic construct
  source 1..21: mol_type = other RNA
  modified_base 1: mod_base = OTHER; note = 2'-O-methylcytidine-3'-phosphorothioate
  modified_base 2: mod_base = OTHER; note = 2'-O-methyladenosine-3'-phosphorothioate
  modified_base 3: mod_base = OTHER; note = 2'-O-methyladenosine-3'-phosphate
  modified_base 4: mod_base = OTHER; note = 2'-O-methylcytidine-3'-phosphate
  modified_base 5: mod_base = OTHER; note = 2'-O-methyluridine-3'-phosphate
  modified_base 6: mod_base = OTHER; note = 2'-O-hexadecyl-uridine-3'-phosphate
  modified_base 7: mod_base = OTHER; note = 2'-deoxy-2'-fluorocytidine-3'-phosphate
  modified_base 8: mod_base = OTHER; note = 2'-O-methyladenosine-3'-phosphate
  modified_base 9: mod_base = OTHER; note = 2'-deoxy-2'-fluorouridine-3'-phosphate
  modified_base 10: mod_base = OTHER; note = 2'-deoxy-2'-fluorouridine-3'-phosphate
  modified_base 11: mod_base = OTHER; note = 2'-deoxy-2'-fluoroguanosine-3'-phosphate
  modified_base 12: mod_base = OTHER; note = 2'-O-methyluridine-3'-phosphate
  modified_base 13: mod_base = OTHER; note = 2'-O-methylcytidine-3'-phosphate
  modified_base 14: mod_base = OTHER; note = 2'-O-methyluridine-3'-phosphate
  modified_base 15: mod_base = OTHER; note = 2'-O-methyluridine-3'-phosphate
  modified_base 16: mod_base = OTHER; note = 2'-O-methylcytidine-3'-phosphate
  modified_base 17: mod_base = OTHER; note = 2'-O-methyluridine-3'-phosphate
  modified_base 18: mod_base = OTHER; note = 2'-O-methyluridine-3'-phosphate
  modified_base 19: mod_base = OTHER; note = 2'-O-methylguanosine-3'-phosphorothioate
  modified_base 20: mod_base = OTHER; note = 2'-O-methyluridine-3'-phosphorothioate
  modified_base 21: mod_base = OTHER; note = 2'-O-methyladenosine
caacttcattgtcttcttgta

SEQ ID NO: 1952 - RNA, 21 nt, synthetic construct
  source 1..21: mol_type = other RNA
  modified_base 1: mod_base = OTHER; note = 2'-O-methyluridine-3'-phosphorothioate
  modified_base 2: mod_base = OTHER; note = 2'-O-methylcytidine-3'-phosphorothioate
  modified_base 3: mod_base = OTHER; note = 2'-O-methyladenosine-3'-phosphate
  modified_base 4: mod_base = OTHER; note = 2'-O-methyluridine-3'-phosphate
  modified_base 5: mod_base = OTHER; note = 2'-O-methyluridine-3'-phosphate
  modified_base 6: mod_base = OTHER; note = 2'-O-hexadecyl-guanosine-3'-phosphate
  modified_base 7: mod_base = OTHER; note = 2'-deoxy-2'-fluorouridine-3'-phosphate
  modified_base 8: mod_base = OTHER; note = 2'-O-methylcytidine-3'-phosphate
  modified_base 9: mod_base = OTHER; note = 2'-deoxy-2'-fluorouridine-3'-phosphate
  modified_base 10: mod_base = OTHER; note = 2'-deoxy-2'-fluorouridine-3'-phosphate
  modified_base 11: mod_base = OTHER; note = 2'-deoxy-2'-fluorocytidine-3'-phosphate
  modified_base 12: mod_base = OTHER; note = 2'-O-methyluridine-3'-phosphate
  modified_base 13: mod_base = OTHER; note = 2'-O-methyluridine-3'-phosphate
  modified_base 14: mod_base = OTHER; note = 2'-O-methylguanosine-3'-phosphate
  modified_base 15: mod_base = OTHER; note = 2'-O-methyluridine-3'-phosphate
  modified_base 16: mod_base = OTHER; note = 2'-O-methylcytidine-3'-phosphate
  modified_base 17: mod_base = OTHER; note = 2'-O-methylcytidine-3'-phosphate
  modified_base 18: mod_base = OTHER; note = 2'-O-methyluridine-3'-phosphate
  modified_base 19: mod_base = OTHER; note = 2'-O-methyluridine-3'-phosphorothioate
  modified_base 20: mod_base = OTHER; note = 2'-O-methylcytidine-3'-phosphorothioate
  modified_base 21: mod_base = OTHER; note = 2'-O-methyladenosine
tcattgtcttcttgtccttca

SEQ ID NO: 1953 - RNA, 21 nt, synthetic construct
  source 1..21: mol_type = other RNA
  modified_base 1: mod_base = OTHER; note = 2'-O-methylguanosine-3'-phosphorothioate
  modified_base 2: mod_base = OTHER; note = 2'-O-methyluridine-3'-phosphorothioate
  modified_base 3: mod_base = OTHER; note = 2'-O-methylcytidine-3'-phosphate
  modified_base 4: mod_base = OTHER; note = 2'-O-methyluridine-3'-phosphate
  modified_base 5: mod_base = OTHER; note = 2'-O-methyluridine-3'-phosphate
  modified_base 6: mod_base = OTHER; note = 2'-O-hexadecyl-cytidine-3'-phosphate
  modified_base 7: mod_base = OTHER; note = 2'-deoxy-2'-fluorouridine-3'-phosphate
  modified_base 8: mod_base = OTHER; note = 2'-O-methyluridine-3'-phosphate
  modified_base 9: mod_base = OTHER; note = 2'-deoxy-2'-fluoroguanosine-3'-phosphate
  modified_base 10: mod_base = OTHER; note = 2'-deoxy-2'-fluorouridine-3'-phosphate
  modified_base 11: mod_base = OTHER; note = 2'-deoxy-2'-fluorocytidine-3'-phosphate
  modified_base 12: mod_base = OTHER; note = 2'-O-methylcytidine-3'-phosphate
  modified_base 13: mod_base = OTHER; note = 2'-O-methyluridine-3'-phosphate
  modified_base 14: mod_base = OTHER; note = 2'-O-methyluridine-3'-phosphate
  modified_base 15: mod_base = OTHER; note = 2'-O-methylcytidine-3'-phosphate
  modified_base 16: mod_base = OTHER; note = 2'-O-methyluridine-3'-phosphate
  modified_base 17: mod_base = OTHER; note = 2'-O-methyluridine-3'-phosphate
  modified_base 18: mod_base = OTHER; note = 2'-O-methylcytidine-3'-phosphate
  modified_base 19: mod_base = OTHER; note = 2'-O-methylguanosine-3'-phosphorothioate
  modified_base 20: mod_base = OTHER; note = 2'-O-methyladenosine-3'-phosphorothioate
  modified_base 21: mod_base = OTHER; note = 2'-O-methyladenosine
gtcttcttgtccttcttcgaa

SEQ ID NO: 1954 - RNA, 21 nt, synthetic construct
  source 1..21: mol_type = other RNA
  modified_base 1: mod_base = OTHER; note = 2'-O-methylcytidine-3'-phosphorothioate
  modified_base 2: mod_base = OTHER; note = 2'-O-methyluridine-3'-phosphorothioate
  modified_base 3: mod_base = OTHER; note = 2'-O-methyluridine-3'-phosphate
  modified_base 4: mod_base = OTHER; note = 2'-O-methylguanosine-3'-phosphate
  modified_base 5: mod_base = OTHER; note = 2'-O-methyluridine-3'-phosphate
  modified_base 6: mod_base = OTHER; note = 2'-O-hexadecyl-cytidine-3'-phosphate
  modified_base 7: mod_base = OTHER; note = 2'-deoxy-2'-fluorocytidine-3'-phosphate
  modified_base 8: mod_base = OTHER; note = 2'-O-methyluridine-3'-phosphate
  modified_base 9: mod_base = OTHER; note = 2'-deoxy-2'-fluorouridine-3'-phosphate
  modified_base 10: mod_base = OTHER; note = 2'-deoxy-2'-fluorocytidine-3'-phosphate
  modified_base 11: mod_base = OTHER; note = 2'-deoxy-2'-fluorouridine-3'-phosphate
  modified_base 12: mod_base = OTHER; note = 2'-O-methyluridine-3'-phosphate
  modified_base 13: mod_base = OTHER; note = 2'-O-methylcytidine-3'-phosphate
  modified_base 14: mod_base = OTHER; note = 2'-O-methylguanosine-3'-phosphate
  modified_base 15: mod_base = OTHER; note = 2'-O-methyladenosine-3'-phosphate
  modified_base 16: mod_base = OTHER; note = 2'-O-methyluridine-3'-phosphate
  modified_base 17: mod_base = OTHER; note = 2'-O-methylcytidine-3'-phosphate
  modified_base 18: mod_base = OTHER; note = 2'-O-methylcytidine-3'-phosphate
  modified_base 19: mod_base = OTHER; note = 2'-O-methyladenosine-3'-phosphorothioate
  modified_base 20: mod_base = OTHER; note = 2'-O-methylguanosine-3'-phosphorothioate
  modified_base 21: mod_base = OTHER; note = 2'-O-methyladenosine
cttgtccttcttcgatccaga

SEQ ID NO: 1955 - RNA, 21 nt, synthetic construct
  source 1..21: mol_type = other RNA
  modified_base 1: mod_base = OTHER; note = 2'-O-methylcytidine-3'-phosphorothioate
  modified_base 2: mod_base = OTHER; note = 2'-O-methylcytidine-3'-phosphorothioate
  modified_base 3: mod_base = OTHER; note = 2'-O-methyluridine-3'-phosphate
  modified_base 4: mod_base = OTHER; note = 2'-O-methyluridine-3'-phosphate
  modified_base 5: mod_base = OTHER; note = 2'-O-methylcytidine-3'-phosphate
  modified_base 6: mod_base = OTHER; note = 2'-O-hexadecyl-uridine-3'-phosphate
  modified_base 7: mod_base = OTHER; note = 2'-deoxy-2'-fluorouridine-3'-phosphate
  modified_base 8: mod_base = OTHER; note = 2'-O-methylcytidine-3'-phosphate
  modified_base 9: mod_base = OTHER; note = 2'-deoxy-2'-fluoroguanosine-3'-phosphate
  modified_base 10: mod_base = OTHER; note = 2'-deoxy-2'-fluoroadenosine-3'-phosphate
  modified_base 11: mod_base = OTHER; note = 2'-deoxy-2'-fluorouridine-3'-phosphate
  modified_base 12: mod_base = OTHER; note = 2'-O-methylcytidine-3'-phosphate
  modified_base 13: mod_base = OTHER; note = 2'-O-methylcytidine-3'-phosphate
  modified_base 14: mod_base = OTHER; note = 2'-O-methyladenosine-3'-phosphate
  modified_base 15: mod_base = OTHER; note = 2'-O-methylguanosine-3'-phosphate
  modified_base 16: mod_base = OTHER; note = 2'-O-methylcytidine-3'-phosphate
  modified_base 17: mod_base = OTHER; note = 2'-O-methylcytidine-3'-phosphate
  modified_base 18: mod_base = OTHER; note = 2'-O-methyluridine-3'-phosphate
  modified_base 19: mod_base = OTHER; note = 2'-O-methyluridine-3'-phosphorothioate
  modified_base 20: mod_base = OTHER; note = 2'-O-methylcytidine-3'-phosphorothioate
  modified_base 21: mod_base = OTHER; note = 2'-O-methyladenosine
ccttcttcgatccagccttca

SEQ ID NO: 1956 - RNA, 21 nt, synthetic construct
  source 1..21: mol_type = other RNA
  modified_base 1: mod_base = OTHER; note = 2'-O-methylguanosine-3'-phosphorothioate
  modified_base 2: mod_base = OTHER; note = 2'-O-methyladenosine-3'-phosphorothioate
  modified_base 3: mod_base = OTHER; note = 2'-O-methyluridine-3'-phosphate
  modified_base 4: mod_base = OTHER; note = 2'-O-methylcytidine-3'-phosphate
  modified_base 5: mod_base = OTHER; note = 2'-O-methylcytidine-3'-phosphate
  modified_base 6: mod_base = OTHER; note = 2'-O-hexadecyl-adenosine-3'-phosphate
  modified_base 7: mod_base = OTHER; note = 2'-deoxy-2'-fluoroguanosine-3'-phosphate
  modified_base 8: mod_base = OTHER; note = 2'-O-methylcytidine-3'-phosphate
  modified_base 9: mod_base = OTHER; note = 2'-deoxy-2'-fluorocytidine-3'-phosphate
  modified_base 10: mod_base = OTHER; note = 2'-deoxy-2'-fluorouridine-3'-phosphate
  modified_base 11: mod_base = OTHER; note = 2'-deoxy-2'-fluorouridine-3'-phosphate
  modified_base 12: mod_base = OTHER; note = 2'-O-methylcytidine-3'-phosphate
  modified_base 13: mod_base = OTHER; note = 2'-O-methyladenosine-3'-phosphate
  modified_base 14: mod_base = OTHER; note = 2'-O-methylguanosine-3'-phosphate
  modified_base 15: mod_base = OTHER; note = 2'-O-methylguanosine-3'-phosphate
  modified_base 16: mod_base = OTHER; note = 2'-O-methyladenosine-3'-phosphate
  modified_base 17: mod_base = OTHER; note = 2'-O-methyladenosine-3'-phosphate
  modified_base 18: mod_base = OTHER; note = 2'-O-methyladenosine-3'-phosphate
  modified_base 19: mod_base = OTHER; note = 2'-O-methyluridine-3'-phosphorothioate
  modified_base 20: mod_base = OTHER; note = 2'-O-methyluridine-3'-phosphorothioate
  modified_base 21: mod_base = OTHER; note = 2'-O-methyladenosine
gatccagccttcaggaaatta

SEQ ID NO: 1957 - RNA, 21 nt, synthetic construct
  source 1..21: mol_type = other RNA
  modified_base 1: mod_base = OTHER; note = 2'-O-methyladenosine-3'-phosphorothioate
  modified_base 2: mod_base = OTHER; note = 2'-O-methylguanosine-3'-phosphorothioate
  modified_base 3: mod_base = OTHER; note = 2'-O-methylcytidine-3'-phosphate
  modified_base 4: mod_base = OTHER; note = 2'-O-methylcytidine-3'-phosphate
  modified_base 5: mod_base = OTHER; note = 2'-O-methyluridine-3'-phosphate
  modified_base 6: mod_base = OTHER; note = 2'-O-hexadecyl-uridine-3'-phosphate
  modified_base 7: mod_base = OTHER; note = 2'-deoxy-2'-fluorocytidine-3'-phosphate
  modified_base 8: mod_base = OTHER; note = 2'-O-methyladenosine-3'-phosphate
  modified_base 9: mod_base = OTHER; note = 2'-deoxy-2'-fluoroguanosine-3'-phosphate
  modified_base 10: mod_base = OTHER; note = 2'-deoxy-2'-fluoroguanosine-3'-phosphate
  modified_base 11: mod_base = OTHER; note = 2'-deoxy-2'-fluoroadenosine-3'-phosphate
  modified_base 12: mod_base = OTHER; note = 2'-O-methyladenosine-3'-phosphate
  modified_base 13: mod_base = OTHER; note = 2'-O-methyladenosine-3'-phosphate
  modified_base 14: mod_base = OTHER; note = 2'-O-methyluridine-3'-phosphate
  modified_base 15: mod_base = OTHER; note = 2'-O-methyluridine-3'-phosphate
  modified_base 16: mod_base = OTHER; note = 2'-O-methylcytidine-3'-phosphate
  modified_base 17: mod_base = OTHER; note = 2'-O-methyladenosine-3'-phosphate
  modified_base 18: mod_base = OTHER; note = 2'-O-methylguanosine-3'-phosphate
  modified_base 19: mod_base = OTHER; note = 2'-O-methyladenosine-3'-phosphorothioate
  modified_base 20: mod_base = OTHER; note = 2'-O-methyladenosine-3'-phosphorothioate
  modified_base 21: mod_base = OTHER; note = 2'-O-methyladenosine
agccttcaggaaattcagaaa

SEQ ID NO: 1958 - RNA, 21 nt, synthetic construct
  source 1..21: mol_type = other RNA
  modified_base 1: mod_base = OTHER; note = 2'-O-methyluridine-3'-phosphorothioate
  modified_base 2: mod_base = OTHER; note = 2'-O-methylcytidine-3'-phosphorothioate
  modified_base 3: mod_base = OTHER; note = 2'-O-methyladenosine-3'-phosphate
  modified_base 4: mod_base = OTHER; note = 2'-O-methylguanosine-3'-phosphate
  modified_base 5: mod_base = OTHER; note = 2'-O-methylguanosine-3'-phosphate
  modified_base 6: mod_base = OTHER; note = 2'-O-hexadecyl-adenosine-3'-phosphate
  modified_base 7: mod_base = OTHER; note = 2'-deoxy-2'-fluoroadenosine-3'-phosphate
  modified_base 8: mod_base = OTHER; note = 2'-O-methyladenosine-3'-phosphate
  modified_base 9: mod_base = OTHER; note = 2'-deoxy-2'-fluorouridine-3'-phosphate
  modified_base 10: mod_base = OTHER; note = 2'-deoxy-2'-fluorouridine-3'-phosphate
  modified_base 11: mod_base = OTHER; note = 2'-deoxy-2'-fluorocytidine-3'-phosphate
  modified_base 12: mod_base = OTHER; note = 2'-O-methyladenosine-3'-phosphate
  modified_base 13: mod_base = OTHER; note = 2'-O-methylguanosine-3'-phosphate
  modified_base 14: mod_base = OTHER; note = 2'-O-methyladenosine-3'-phosphate
  modified_base 15: mod_base = OTHER; note = 2'-O-methyladenosine-3'-phosphate
  modified_base 16: mod_base = OTHER; note = 2'-O-methylcytidine-3'-phosphate
  modified_base 17: mod_base = OTHER; note = 2'-O-methylcytidine-3'-phosphate
  modified_base 18: mod_base = OTHER; note = 2'-O-methyladenosine-3'-phosphate
  modified_base 19: mod_base = OTHER; note = 2'-O-methyladenosine-3'-phosphorothioate
  modified_base 20: mod_base = OTHER; note = 2'-O-methylcytidine-3'-phosphorothioate
  modified_base 21: mod_base = OTHER; note = 2'-O-methyladenosine
tcaggaaattcagaaccaaca

SEQ ID NO: 1959 - RNA, 21 nt, synthetic construct
  source 1..21: mol_type = other RNA
  modified_base 1: mod_base = OTHER; note = 2'-O-methyladenosine-3'-phosphorothioate
  modified_base 2: mod_base = OTHER; note = 2'-O-methyluridine-3'-phosphorothioate
  modified_base 3: mod_base = OTHER; note = 2'-O-methyluridine-3'-phosphate
  modified_base 4: mod_base = OTHER; note = 2'-O-methylcytidine-3'-phosphate
  modified_base 5: mod_base = OTHER; note = 2'-O-methyladenosine-3'-phosphate
  modified_base 6: mod_base = OTHER; note = 2'-O-hexadecyl-guanosine-3'-phosphate
  modified_base 7: mod_base = OTHER; note = 2'-deoxy-2'-fluoroadenosine-3'-phosphate
  modified_base 8: mod_base = OTHER; note = 2'-O-methyladenosine-3'-phosphate
  modified_base 9: mod_base = OTHER; note = 2'-deoxy-2'-fluorocytidine-3'-phosphate
  modified_base 10: mod_base = OTHER; note = 2'-deoxy-2'-fluorocytidine-3'-phosphate
  modified_base 11: mod_base = OTHER; note = 2'-deoxy-2'-fluoroadenosine-3'-phosphate
  modified_base 12: mod_base = OTHER; note = 2'-O-methyladenosine-3'-phosphate
  modified_base 13: mod_base = OTHER; note = 2'-O-methylcytidine-3'-phosphate
  modified_base 14: mod_base = OTHER; note = 2'-O-methyluridine-3'-phosphate
  modified_base 15: mod_base = OTHER; note = 2'-O-methyluridine-3'-phosphate
  modified_base 16: mod_base = OTHER; note = 2'-O-methyluridine-3'-phosphate
  modified_base 17: mod_base = OTHER; note = 2'-O-methylguanosine-3'-phosphate
  modified_base 18: mod_base = OTHER; note = 2'-O-methyladenosine-3'-phosphate
  modified_base 19: mod_base = OTHER; note = 2'-O-methyluridine-3'-phosphorothioate
  modified_base 20: mod_base = OTHER; note = 2'-O-methyluridine-3'-phosphorothioate
  modified_base 21: mod_base = OTHER; note = 2'-O-methyladenosine
attcagaaccaactttgatta

SEQ ID NO: 1960 - RNA, 21 nt, synthetic construct
  source 1..21: mol_type = other RNA
  modified_base 1: mod_base = OTHER; note = 2'-O-methyladenosine-3'-phosphorothioate
  modified_base 2: mod_base = OTHER; note = 2'-O-methyladenosine-3'-phosphorothioate
  modified_base 3: mod_base = OTHER; note = 2'-O-methylcytidine-3'-phosphate
  modified_base 4: mod_base = OTHER; note = 2'-O-methylcytidine-3'-phosphate
  modified_base 5: mod_base = OTHER; note = 2'-O-methyladenosine-3'-phosphate
  modified_base 6: mod_base = OTHER; note = 2'-O-hexadecyl-adenosine-3'-phosphate
  modified_base 7: mod_base = OTHER; note = 2'-deoxy-2'-fluorocytidine-3'-phosphate
  modified_base 8: mod_base = OTHER; note = 2'-O-methyluridine-3'-phosphate
  modified_base 9: mod_base = OTHER; note = 2'-deoxy-2'-fluorouridine-3'-phosphate
  modified_base 10: mod_base = OTHER; note = 2'-deoxy-2'-fluorouridine-3'-phosphate
  modified_base 11: mod_base = OTHER; note = 2'-deoxy-2'-fluoroguanosine-3'-phosphate
  modified_base 12: mod_base = OTHER; note = 2'-O-methyladenosine-3'-phosphate
  modified_base 13: mod_base = OTHER; note = 2'-O-methyluridine-3'-phosphate
  modified_base 14: mod_base = OTHER; note = 2'-O-methyluridine-3'-phosphate
  modified_base 15: mod_base = OTHER; note = 2'-O-methyluridine-3'-phosphate
  modified_base 16: mod_base = OTHER; note = 2'-O-methylcytidine-3'-phosphate
  modified_base 17: mod_base = OTHER; note = 2'-O-methyladenosine-3'-phosphate
  modified_base 18: mod_base = OTHER; note = 2'-O-methyluridine-3'-phosphate
  modified_base 19: mod_base = OTHER; note = 2'-O-methylguanosine-3'-phosphorothioate
  modified_base 20: mod_base = OTHER; note = 2'-O-methyladenosine-3'-phosphorothioate
  modified_base 21: mod_base = OTHER; note = 2'-O-methyladenosine
aaccaactttgatttcatgaa

SEQ ID NO: 1961 - RNA, 21 nt, synthetic construct
  source 1..21: mol_type = other RNA
  modified_base 1: mod_base = OTHER; note = 2'-O-methyluridine-3'-phosphorothioate
  modified_base 2: mod_base = OTHER; note = 2'-O-methyluridine-3'-phosphorothioate
  modified_base 3: mod_base = OTHER; note = 2'-O-methyluridine-3'-phosphate
  modified_base 4: mod_base = OTHER; note = 2'-O-methylguanosine-3'-phosphate
  modified_base 5: mod_base = OTHER; note = 2'-O-methyladenosine-3'-phosphate
  modified_base 6: mod_base = OTHER; note = 2'-O-hexadecyl-uridine-3'-phosphate
  modified_base 7: mod_base = OTHER; note = 2'-deoxy-2'-fluorouridine-3'-phosphate
  modified_base 8: mod_base = OTHER; note = 2'-O-methyluridine-3'-phosphate
  modified_base 9: mod_base = OTHER; note = 2'-deoxy-2'-fluorocytidine-3'-phosphate
  modified_base 10: mod_base = OTHER; note = 2'-deoxy-2'-fluoroadenosine-3'-phosphate
  modified_base 11: mod_base = OTHER; note = 2'-deoxy-2'-fluorouridine-3'-phosphate
  modified_base 12: mod_base = OTHER; note = 2'-O-methylguanosine-3'-phosphate
  modified_base 13: mod_base = OTHER; note = 2'-O-methyladenosine-3'-phosphate
  modified_base 14: mod_base = OTHER; note = 2'-O-methyluridine-3'-phosphate
  modified_base 15: mod_base = OTHER; note = 2'-O-methylcytidine-3'-phosphate
  modified_base 16: mod_base = OTHER; note = 2'-O-methylcytidine-3'-phosphate
  modified_base 17: mod_base = OTHER; note = 2'-O-methyluridine-3'-phosphate
  modified_base 18: mod_base = OTHER; note = 2'-O-methylguanosine-3'-phosphate
  modified_base 19: mod_base = OTHER; note = 2'-O-methyladenosine-3'-phosphorothioate
  modified_base 20: mod_base = OTHER; note = 2'-O-methyladenosine-3'-phosphorothioate
  modified_base 21: mod_base = OTHER; note = 2'-O-methyladenosine
tttgatttcatgatcctgaaa

SEQ ID NO: 1962 - RNA, 21 nt, synthetic construct
  source 1..21: mol_type = other RNA
  modified_base 1: mod_base = OTHER; note = 2'-O-methyluridine-3'-phosphorothioate
  modified_base 2: mod_base = OTHER; note = 2'-O-methyluridine-3'-phosphorothioate
  modified_base 3: mod_base = OTHER; note = 2'-O-methylcytidine-3'-phosphate
  modified_base 4: mod_base = OTHER; note = 2'-O-methyladenosine-3'-phosphate
  modified_base 5: mod_base = OTHER; note = 2'-O-methyluridine-3'-phosphate
  modified_base 6: mod_base = OTHER; note = 2'-O-hexadecyl-guanosine-3'-phosphate
  modified_base 7: mod_base = OTHER; note = 2'-deoxy-2'-fluoroadenosine-3'-phosphate
  modified_base 8: mod_base = OTHER; note = 2'-O-methyluridine-3'-phosphate
  modified_base 9: mod_base = OTHER; note = 2'-deoxy-2'-fluorocytidine-3'-phosphate
  modified_base 10: mod_base = OTHER; note = 2'-deoxy-2'-fluorocytidine-3'-phosphate
  modified_base 11: mod_base = OTHER; note = 2'-deoxy-2'-fluorouridine-3'-phosphate
  modified_base 12: mod_base = OTHER; note = 2'-O-methylguanosine-3'-phosphate
  modified_base 13: mod_base = OTHER; note = 2'-O-methyladenosine-3'-phosphate
  modified_base 14: mod_base = OTHER; note = 2'-O-methyladenosine-3'-phosphate
  modified_base 15: mod_base = OTHER; note = 2'-O-methylcytidine-3'-phosphate
  modified_base 16: mod_base = OTHER; note = 2'-O-methylcytidine-3'-phosphate
  modified_base 17: mod_base = OTHER; note = 2'-O-methyluridine-3'-phosphate
  modified_base 18: mod_base = OTHER; note = 2'-O-methylguanosine-3'-phosphate
  modified_base 19: mod_base = OTHER; note = 2'-O-methyluridine-3'-phosphorothioate
  modified_base 20: mod_base = OTHER; note = 2'-O-methylcytidine-3'-phosphorothioate
  modified_base 21: mod_base = OTHER; note = 2'-O-methyladenosine
ttcatgatcctgaacctgtca

SEQ ID NO: 1963 - RNA, 21 nt, synthetic construct
  source 1..21: mol_type = other RNA
  modified_base 1: mod_base = OTHER; note = 2'-O-methylguanosine-3'-phosphorothioate
  modified_base 2: mod_base = OTHER; note = 2'-O-methyladenosine-3'-phosphorothioate
  modified_base 3: mod_base = OTHER; note = 2'-O-methyluridine-3'-phosphate
  modified_base 4: mod_base = OTHER; note = 2'-O-methylcytidine-3'-phosphate
  modified_base 5: mod_base = OTHER; note = 2'-O-methylcytidine-3'-phosphate
  modified_base 6: mod_base = OTHER; note = 2'-O-hexadecyl-uridine-3'-phosphate
  modified_base 7: mod_base = OTHER; note = 2'-deoxy-2'-fluoroguanosine-3'-phosphate
  modified_base 8: mod_base = OTHER; note = 2'-O-methyladenosine-3'-phosphate
  modified_base 9: mod_base = OTHER; note = 2'-deoxy-2'-fluoroadenosine-3'-phosphate
  modified_base 10: mod_base = OTHER; note = 2'-deoxy-2'-fluorocytidine-3'-phosphate
  modified_base 11: mod_base = OTHER; note = 2'-deoxy-2'-fluorocytidine-3'-phosphate
  modified_base 12: mod_base = OTHER; note = 2'-O-methyluridine-3'-phosphate
  modified_base 13: mod_base = OTHER; note = 2'-O-methylguanosine-3'-phosphate
  modified_base 14: mod_base = OTHER; note = 2'-O-methyluridine-3'-phosphate
  modified_base 15: mod_base = OTHER; note = 2'-O-methylcytidine-3'-phosphate
  modified_base 16: mod_base = OTHER; note = 2'-O-methylcytidine-3'-phosphate
  modified_base 17: mod_base = OTHER; note = 2'-O-methyluridine-3'-phosphate
  modified_base 18: mod_base = OTHER; note = 2'-O-methyluridine-3'-phosphate
  modified_base 19: mod_base = OTHER; note = 2'-O-methylcytidine-3'-phosphorothioate
  modified_base 20: mod_base = OTHER; note = 2'-O-methyluridine-3'-phosphorothioate
  modified_base 21: mod_base = OTHER; note = 2'-O-methyladenosine
gatcctgaacctgtccttcta

SEQ ID NO: 1964 - RNA, 21 nt, synthetic construct
  source 1..21: mol_type = other RNA
  modified_base 1: mod_base = OTHER; note = 2'-O-methylguanosine-3'-phosphorothioate
  modified_base 2: mod_base = OTHER; note = 2'-O-methyladenosine-3'-phosphorothioate
  modified_base 3: mod_base = OTHER; note = 2'-O-methyladenosine-3'-phosphate
  modified_base 4: mod_base = OTHER; note = 2'-O-methylcytidine-3'-phosphate
  modified_base 5: mod_base = OTHER; note = 2'-O-methylcytidine-3'-phosphate
  modified_base 6: mod_base = OTHER; note = 2'-O-hexadecyl-uridine-3'-phosphate
  modified_base 7: mod_base = OTHER; note = 2'-deoxy-2'-fluoroguanosine-3'-phosphate
  modified_base 8: mod_base = OTHER; note = 2'-O-methyluridine-3'-phosphate
  modified_base 9: mod_base = OTHER; note = 2'-deoxy-2'-fluorocytidine-3'-phosphate
  modified_base 10: mod_base = OTHER; note = 2'-deoxy-2'-fluorocytidine-3'-phosphate
  modified_base 11: mod_base = OTHER; note = 2'-deoxy-2'-fluorouridine-3'-phosphate
  modified_base 12: mod_base = OTHER; note = 2'-O-methyluridine-3'-phosphate
  modified_base 13: mod_base = OTHER; note = 2'-O-methylcytidine-3'-phosphate
  modified_base 14: mod_base = OTHER; note = 2'-O-methyluridine-3'-phosphate
  modified_base 15: mod_base = OTHER; note = 2'-O-methylguanosine-3'-phosphate
  modified_base 16: mod_base = OTHER; note = 2'-O-methyluridine-3'-phosphate
  modified_base 17: mod_base = OTHER; note = 2'-O-methylguanosine-3'-phosphate
  modified_base 18: mod_base = OTHER; note = 2'-O-methyladenosine-3'-phosphate
  modified_base 19: mod_base = OTHER; note = 2'-O-methylcytidine-3'-phosphorothioate
  modified_base 20: mod_base = OTHER; note = 2'-O-methylcytidine-3'-phosphorothioate
  modified_base 21: mod_base = OTHER; note = 2'-O-methyladenosine
gaacctgtccttctgtgacca

SEQ ID NO: 1965 - RNA, 21 nt, synthetic construct
  source 1..21: mol_type = other RNA
  modified_base 1: mod_base = OTHER; note = 2'-O-methyluridine-3'-phosphorothioate
  modified_base 2: mod_base = OTHER; note = 2'-O-methylguanosine-3'-phosphorothioate
  modified_base 3: mod_base = OTHER; note = 2'-O-methyluridine-3'-phosphate
  modified_base 4: mod_base = OTHER; note = 2'-O-methylcytidine-3'-phosphate
  modified_base 5: mod_base = OTHER; note = 2'-O-methylcytidine-3'-phosphate
  modified_base 6: mod_base = OTHER; note = 2'-O-hexadecyl-uridine-3'-phosphate
  modified_base 7: mod_base = OTHER; note = 2'-deoxy-2'-fluorouridine-3'-phosphate
  modified_base 8: mod_base = OTHER; note = 2'-O-methylcytidine-3'-phosphate
  modified_base 9: mod_base = OTHER; note = 2'-deoxy-2'-fluorouridine-3'-phosphate
  modified_base 10: mod_base = OTHER; note = 2'-deoxy-2'-fluoroguanosine-3'-phosphate
  modified_base 11: mod_base = OTHER; note = 2'-deoxy-2'-fluorouridine-3'-phosphate
  modified_base 12: mod_base = OTHER; note = 2'-O-methylguanosine-3'-phosphate
  modified_base 13: mod_base = OTHER; note = 2'-O-methyladenosine-3'-phosphate
  modified_base 14: mod_base = OTHER; note = 2'-O-methylcytidine-3'-phosphate
  modified_base 15: mod_base = OTHER; note = 2'-O-methylcytidine-3'-phosphate
  modified_base 16: mod_base = OTHER; note = 2'-O-methyluridine-3'-phosphate
  modified_base 17: mod_base = OTHER; note = 2'-O-methylcytidine-3'-phosphate
  modified_base 18: mod_base = OTHER; note = 2'-O-methyluridine-3'-phosphate
  modified_base 19: mod_base = OTHER; note = 2'-O-methyluridine-3'-phosphorothioate
  modified_base 20: mod_base = OTHER; note = 2'-O-methylcytidine-3'-phosphorothioate
  modified_base 21: mod_base = OTHER; note = 2'-O-methyladenosine
tgtccttctgtgacctcttca

SEQ ID NO: 1966 - RNA, 21 nt, synthetic construct
  source 1..21: mol_type = other RNA
  modified_base 1: mod_base = OTHER; note = 2'-O-methyluridine-3'-phosphorothioate
  modified_base 2: mod_base = OTHER; note = 2'-O-methyluridine-3'-phosphorothioate
  modified_base 3: mod_base = OTHER; note = 2'-O-methylcytidine-3'-phosphate
  modified_base 4: mod_base = OTHER; note = 2'-O-methyluridine-3'-phosphate
  modified_base 5: mod_base = OTHER; note = 2'-O-methylguanosine-3'-phosphate
  modified_base 6: mod_base = OTHER; note = 2'-O-hexadecyl-uridine-3'-phosphate
  modified_base 7: mod_base = OTHER; note = 2'-deoxy-2'-fluoroguanosine-3'-phosphate
  modified_base 8: mod_base = OTHER; note = 2'-O-methyladenosine-3'-phosphate
  modified_base 9: mod_base = OTHER; note = 2'-deoxy-2'-fluorocytidine-3'-phosphate
  modified_base 10: mod_base = OTHER; note = 2'-deoxy-2'-fluorocytidine-3'-phosphate
  modified_base 11: mod_base = OTHER; note = 2'-deoxy-2'-fluorouridine-3'-phosphate
  modified_base 12: mod_base = OTHER; note = 2'-O-methylcytidine-3'-phosphate
  modified_base 13: mod_base = OTHER; note = 2'-O-methyluridine-3'-phosphate
  modified_base 14: mod_base = OTHER; note = 2'-O-methyluridine-3'-phosphate
  modified_base 15: mod_base = OTHER; note = 2'-O-methylcytidine-3'-phosphate
  modified_base 16: mod_base = OTHER; note = 2'-O-methyladenosine-3'-phosphate
  modified_base 17: mod_base = OTHER; note = 2'-O-methyluridine-3'-phosphate
  modified_base 18: mod_base = OTHER; note = 2'-O-methyluridine-3'-phosphate
  modified_base 19: mod_base = OTHER; note = 2'-O-methyluridine-3'-phosphorothioate
  modified_base 20: mod_base = OTHER; note = 2'-O-methylguanosine-3'-phosphorothioate
  modified_base 21: mod_base = OTHER; note = 2'-O-methyladenosine
ttctgtgacctcttcatttga

SEQ ID NO: 1967 - RNA, 21 nt, synthetic construct
  source 1..21: mol_type = other RNA
  modified_base 1: mod_base = OTHER; note = 2'-O-methylguanosine-3'-phosphorothioate
  modified_base 2: mod_base = OTHER; note = 2'-O-methyladenosine-3'-phosphorothioate
  modified_base 3: mod_base = OTHER; note = 2'-O-methylcytidine-3'-phosphate
  modified_base 4: mod_base = OTHER; note = 2'-O-methylcytidine-3'-phosphate
  modified_base 5: mod_base = OTHER; note = 2'-O-methyluridine-3'-phosphate
  modified_base 6: mod_base = OTHER; note = 2'-O-hexadecyl-cytidine-3'-phosphate
  modified_base 7: mod_base = OTHER; note = 2'-deoxy-2'-fluorouridine-3'-phosphate
  modified_base 8: mod_base = OTHER; note = 2'-O-methyluridine-3'-phosphate
  modified_base 9: mod_base = OTHER; note = 2'-deoxy-2'-fluorocytidine-3'-phosphate
  modified_base 10: mod_base = OTHER; note = 2'-deoxy-2'-fluoroadenosine-3'-phosphate
  modified_base 11: mod_base = OTHER; note = 2'-deoxy-2'-fluorouridine-3'-phosphate
  modified_base 12: mod_base = OTHER; note = 2'-O-methyluridine-3'-phosphate
  modified_base 13: mod_base = OTHER; note = 2'-O-methyluridine-3'-phosphate
  modified_base 14: mod_base = OTHER; note = 2'-O-methylguanosine-3'-phosphate
  modified_base 15: mod_base = OTHER; note = 2'-O-methyluridine-3'-phosphate
  modified_base 16: mod_base = OTHER; note = 2'-O-methylguanosine-3'-phosphate
  modified_base 17: mod_base = OTHER; note = 2'-O-methylguanosine-3'-phosphate
  modified_base 18: mod_base = OTHER; note = 2'-O-methyladenosine-3'-phosphate
  modified_base 19: mod_base = OTHER; note = 2'-O-methylguanosine-3'-phosphorothioate
  modified_base 20: mod_base = OTHER; note = 2'-O-methyluridine-3'-phosphorothioate
  modified_base 21: mod_base = OTHER; note = 2'-O-methyladenosine
gacctcttcatttgtggagta

SEQ ID NO: 1968 - RNA, 21 nt, synthetic construct
  source 1..21: mol_type = other RNA
  modified_base 1: mod_base = OTHER; note = 2'-O-methylcytidine-3'-phosphorothioate
  modified_base 2: mod_base = OTHER; note = 2'-O-methyluridine-3'-phosphorothioate
  modified_base 3: mod_base = OTHER; note = 2'-O-methyluridine-3'-phosphate
  modified_base 4: mod_base = OTHER; note = 2'-O-methylcytidine-3'-phosphate
  modified_base 5: mod_base = OTHER; note = 2'-O-methyladenosine-3'-phosphate
  modified_base 6: mod_base = OTHER; note = 2'-O-hexadecyl-uridine-3'-phosphate
  modified_base 7: mod_base = OTHER; note = 2'-deoxy-2'-fluorouridine-3'-phosphate
  modified_base 8: mod_base = OTHER; note = 2'-O-methyluridine-3'-phosphate
  modified_base 9: mod_base = OTHER; note = 2'-deoxy-2'-fluoroguanosine-3'-phosphate
  modified_base 10: mod_base = OTHER; note = 2'-deoxy-2'-fluorouridine-3'-phosphate
  modified_base 11: mod_base = OTHER; note = 2'-deoxy-2'-fluoroguanosine-3'-phosphate
  modified_base 12: mod_base = OTHER; note = 2'-O-methylguanosine-3'-phosphate
  modified_base 13: mod_base = OTHER; note = 2'-O-methyladenosine-3'-phosphate
  modified_base 14: mod_base = OTHER; note = 2'-O-methylguanosine-3'-phosphate
  modified_base 15: mod_base = OTHER; note = 2'-O-methyluridine-3'-phosphate
  modified_base 16: mod_base = OTHER; note = 2'-O-methylguanosine-3'-phosphate
  modified_base 17: mod_base = OTHER; note = 2'-O-methyladenosine-3'-phosphate
  modified_base 18: mod_base = OTHER; note = 2'-O-methylcytidine-3'-phosphate
  modified_base 19: mod_base = OTHER; note = 2'-O-methyladenosine-3'-phosphorothioate
  modified_base 20: mod_base = OTHER; note = 2'-O-methylguanosine-3'-phosphorothioate
  modified_base 21: mod_base = OTHER; note = 2'-O-methyladenosine
cttcatttgtggagtgacaga

SEQ ID NO: 1969 - RNA, 21 nt, synthetic construct
  source 1..21: mol_type = other RNA
  modified_base 1: mod_base = OTHER; note = 2'-O-methylcytidine-3'-phosphorothioate
  modified_base 2: mod_base = OTHER; note = 2'-O-methyladenosine-3'-phosphorothioate
  modified_base 3: mod_base = OTHER; note = 2'-O-methyluridine-3'-phosphate
  modified_base 4: mod_base = OTHER; note = 2'-O-methylguanosine-3'-phosphate
  modified_base 5: mod_base = OTHER; note = 2'-O-methyluridine-3'-phosphate
  modified_base 6: mod_base = OTHER; note = 2'-O-hexadecyl-uridine-3'-phosphate
  modified_base 7: mod_base = OTHER; note = 2'-deoxy-2'-fluorocytidine-3'-phosphate
  modified_base 8: mod_base = OTHER; note = 2'-O-methyladenosine-3'-phosphate
  modified_base 9: mod_base = OTHER; note = 2'-deoxy-2'-fluorocytidine-3'-phosphate
  modified_base 10: mod_base = OTHER; note = 2'-deoxy-2'-fluorocytidine-3'-phosphate
  modified_base 11: mod_base = OTHER; note = 2'-deoxy-2'-fluorouridine-3'-phosphate
  modified_base 12: mod_base = OTHER; note = 2'-O-methyluridine-3'-phosphate
  modified_base 13: mod_base = OTHER; note = 2'-O-methyluridine-3'-phosphate
  modified_base 14: mod_base = OTHER; note = 2'-O-methylguanosine-3'-phosphate
  modified_base 15: mod_base = OTHER; note = 2'-O-methyluridine-3'-phosphate
  modified_base 16: mod_base = OTHER; note = 2'-O-methylguanosine-3'-phosphate
  modified_base 17: mod_base = OTHER; note = 2'-O-methyluridine-3'-phosphate
  modified_base 18: mod_base = OTHER; note = 2'-O-methyluridine-3'-phosphate
  modified_base 19: mod_base = OTHER; note = 2'-O-methyladenosine-3'-phosphorothioate
  modified_base 20: mod_base = OTHER; note = 2'-O-methyluridine-3'-phosphorothioate
  modified_base 21: mod_base = OTHER; note = 2'-O-methyladenosine
catgttcacctttgtgttata

SEQ ID NO: 1970 - RNA, 21 nt, synthetic construct
  source 1..21: mol_type = other RNA
  modified_base 1: mod_base = OTHER; note = 2'-O-methyluridine-3'-phosphorothioate
  modified_base 2: mod_base = OTHER; note = 2'-O-methylcytidine-3'-phosphorothioate
  modified_base 3: mod_base = OTHER; note = 2'-O-methyladenosine-3'-phosphate
  modified_base 4: mod_base = OTHER; note = 2'-O-methylcytidine-3'-phosphate
  modified_base 5: mod_base = OTHER; note = 2'-O-methylcytidine-3'-phosphate
  modified_base 6: mod_base = OTHER; note = 2'-O-hexadecyl-uridine-3'-phosphate
  modified_base 7: mod_base = OTHER; note = 2'-deoxy-2'-fluorouridine-3'-phosphate
  modified_base 8: mod_base = OTHER; note = 2'-O-methyluridine-3'-phosphate
  modified_base 9: mod_base = OTHER; note = 2'-deoxy-2'-fluoroguanosine-3'-phosphate
  modified_base 10: mod_base = OTHER; note = 2'-deoxy-2'-fluorouridine-3'-phosphate
  modified_base 11: mod_base = OTHER; note = 2'-deoxy-2'-fluoroguanosine-3'-phosphate
  modified_base 12: mod_base = OTHER; note = 2'-O-methyluridine-3'-phosphate
  modified_base 13: mod_base = OTHER; note = 2'-O-methyluridine-3'-phosphate
  modified_base 14: mod_base = OTHER; note = 2'-O-methyladenosine-3'-phosphate
  modified_base 15: mod_base = OTHER; note = 2'-O-methyluridine-3'-phosphate
  modified_base 16: mod_base = OTHER; note = 2'-O-methyluridine-3'-phosphate
  modified_base 17: mod_base = OTHER; note = 2'-O-methylcytidine-3'-phosphate
  modified_base 18: mod_base = OTHER; note = 2'-O-methyluridine-3'-phosphate
  modified_base 19: mod_base = OTHER; note = 2'-O-methyluridine-3'-phosphorothioate
  modified_base 20: mod_base = OTHER; note = 2'-O-methylcytidine-3'-phosphorothioate
  modified_base 21: mod_base = OTHER; note = 2'-O-methyladenosine
tcacctttgtgttattcttca

SEQ ID NO: 1971 - RNA, 21 nt, synthetic construct
  source 1..21: mol_type = other RNA
  modified_base 1: mod_base = OTHER; note = 2'-O-methyluridine-3'-phosphorothioate
  modified_base 2: mod_base = OTHER; note = 2'-O-methyluridine-3'-phosphorothioate
  modified_base 3: mod_base = OTHER; note = 2'-O-methyluridine-3'-phosphate
  modified_base 4: mod_base = OTHER; note = 2'-O-methylguanosine-3'-phosphate
  modified_base 5: mod_base = OTHER; note = 2'-O-methyluridine-3'-phosphate
  modified_base 6: mod_base = OTHER; note = 2'-O-hexadecyl-guanosine-3'-phosphate
  modified_base 7: mod_base = OTHER; note = 2'-deoxy-2'-fluorouridine-3'-phosphate
  modified_base 8: mod_base = OTHER; note = 2'-O-methyluridine-3'-phosphate
  modified_base 9: mod_base = OTHER; note = 2'-deoxy-2'-fluoroadenosine-3'-phosphate
  modified_base 10: mod_base = OTHER; note = 2'-deoxy-2'-fluorouridine-3'-phosphate
  modified_base 11: mod_base = OTHER; note = 2'-deoxy-2'-fluorouridine-3'-phosphate
  modified_base 12: mod_base = OTHER; note = 2'-O-methylcytidine-3'-phosphate
  modified_base 13: mod_base = OTHER; note = 2'-O-methyluridine-3'-phosphate
  modified_base 14: mod_base = OTHER; note = 2'-O-methyluridine-3'-phosphate
  modified_base 15: mod_base = OTHER; note = 2'-O-methylcytidine-3'-phosphate
  modified_base 16: mod_base = OTHER; note = 2'-O-methyladenosine-3'-phosphate
  modified_base 17: mod_base = OTHER; note = 2'-O-methylguanosine-3'-phosphate
  modified_base 18: mod_base = OTHER; note = 2'-O-methylcytidine-3'-phosphate
  modified_base 19: mod_base = OTHER; note = 2'-O-methyluridine-3'-phosphorothioate
  modified_base 20: mod_base = OTHER; note = 2'-O-methylcytidine-3'-phosphorothioate
  modified_base 21: mod_base = OTHER; note = 2'-O-methyladenosine
tttgtgttattcttcagctca

SEQ ID NO: 1972 - RNA, 21 nt, synthetic construct
  source 1..21: mol_type = other RNA
  modified_base 1: mod_base = OTHER; note = 2'-O-methylguanosine-3'-phosphorothioate
  modified_base 2: mod_base = OTHER; note = 2'-O-methyluridine-3'-phosphorothioate
  modified_base 3: mod_base = OTHER; note = 2'-O-methyluridine-3'-phosphate
  modified_base 4: mod_base = OTHER; note = 2'-O-methyladenosine-3'-phosphate
  modified_base 5: mod_base = OTHER; note = 2'-O-methyluridine-3'-phosphate
  modified_base 6: mod_base = OTHER; note = 2'-O-hexadecyl-uridine-3'-phosphate
  modified_base 7: mod_base = OTHER; note = 2'-deoxy-2'-fluorocytidine-3'-phosphate
  modified_base 8: mod_base = OTHER; note = 2'-O-methyluridine-3'-phosphate
  modified_base 9: mod_base = OTHER; note = 2'-deoxy-2'-fluorouridine-3'-phosphate
  modified_base 10: mod_base = OTHER; note = 2'-deoxy-2'-fluorocytidine-3'-phosphate
  modified_base 11: mod_base = OTHER; note = 2'-deoxy-2'-fluoroadenosine-3'-phosphate
  modified_base 12: mod_base = OTHER; note = 2'-O-methylguanosine-3'-phosphate
  modified_base 13: mod_base = OTHER; note = 2'-O-methylcytidine-3'-phosphate
  modified_base 14: mod_base = OTHER; note = 2'-O-methyluridine-3'-phosphate
  modified_base 15: mod_base = OTHER; note = 2'-O-methylcytidine-3'-phosphate
  modified_base 16: mod_base = OTHER; note = 2'-O-methyladenosine-3'-phosphate
  modified_base 17: mod_base = OTHER; note = 2'-O-methylguanosine-3'-phosphate
  modified_base 18: mod_base = OTHER; note = 2'-O-methylcytidine-3'-phosphate
  modified_base 19: mod_base = OTHER; note = 2'-O-methylcytidine-3'-phosphorothioate
  modified_base 20: mod_base = OTHER; note = 2'-O-methyladenosine-3'-phosphorothioate
  modified_base 21: mod_base = OTHER; note = 2'-O-methyladenosine
gttattcttcagctcagccaa

SEQ ID NO: 1973 - RNA, 21 nt, synthetic construct
  source 1..21: mol_type = other RNA
  modified_base 1: mod_base = OTHER; note = 2'-O-methylcytidine-3'-phosphorothioate
  modified_base 2: mod_base = OTHER; note = 2'-O-methyladenosine-3'-phosphorothioate
  modified_base 3: mod_base = OTHER; note = 2'-O-methylguanosine-3'-phosphate
  modified_base 4: mod_base = OTHER; note = 2'-O-methylcytidine-3'-phosphate
  modified_base 5: mod_base = OTHER; note = 2'-O-methyluridine-3'-phosphate
  modified_base 6: mod_base = OTHER; note = 2'-O-hexadecyl-cytidine-3'-phosphate
  modified_base 7: mod_base = OTHER; note = 2'-deoxy-2'-fluoroadenosine-3'-phosphate
  modified_base 8: mod_base = OTHER; note = 2'-O-methylguanosine-3'-phosphate
  modified_base 9: mod_base = OTHER; note = 2'-deoxy-2'-fluorocytidine-3'-phosphate
  modified_base 10: mod_base = OTHER; note = 2'-deoxy-2'-fluorocytidine-3'-phosphate
  modified_base 11: mod_base = OTHER; note = 2'-deoxy-2'-fluoroadenosine-3'-phosphate
  modified_base 12: mod_base = OTHER; note = 2'-O-methylguanosine-3'-phosphate
  modified_base 13: mod_base = OTHER; note = 2'-O-methyluridine-3'-phosphate
  modified_base 14: mod_base = OTHER; note = 2'-O-methyladenosine-3'-phosphate
  modified_base 15: mod_base = OTHER; note = 2'-O-methylguanosine-3'-phosphate
  modified_base 16: mod_base = OTHER; note = 2'-O-methyluridine-3'-phosphate
  modified_base 17: mod_base = OTHER; note = 2'-O-methyladenosine-3'-phosphate
  modified_base 18: mod_base = OTHER; note = 2'-O-methyluridine-3'-phosphate
  modified_base 19: mod_base = OTHER; note = 2'-O-methylcytidine-3'-phosphorothioate
  modified_base 20: mod_base = OTHER; note = 2'-O-methylcytidine-3'-phosphorothioate
  modified_base 21: mod_base = OTHER; note = 2'-O-methyladenosine
cagctcagccagtagtatcca

SEQ ID NO: 1974 - RNA, 21 nt, synthetic construct
  source 1..21: mol_type = other RNA
  modified_base 1: mod_base = OTHER; note = 2'-O-methylcytidine-3'-phosphorothioate
  modified_base 2: mod_base = OTHER; note = 2'-O-methyladenosine-3'-phosphorothioate
  modified_base 3: mod_base = OTHER; note = 2'-O-methylguanosine-3'-phosphate
  modified_base 4: mod_base = OTHER; note = 2'-O-methylcytidine-3'-phosphate
  modified_base 5: mod_base = OTHER; note = 2'-O-methylcytidine-3'-phosphate
  modified_base 6: mod_base = OTHER; note = 2'-O-hexadecyl-adenosine-3'-phosphate
  modified_base 7: mod_base = OTHER; note = 2'-deoxy-2'-fluoroguanosine-3'-phosphate
  modified_base 8: mod_base = OTHER; note = 2'-O-methyluridine-3'-phosphate
  modified_base 9: mod_base = OTHER; note = 2'-deoxy-2'-fluoroadenosine-3'-phosphate
  modified_base 10: mod_base = OTHER; note = 2'-deoxy-2'-fluoroguanosine-3'-phosphate
  modified_base 11: mod_base = OTHER; note = 2'-deoxy-2'-fluorouridine-3'-phosphate
  modified_base 12: mod_base = OTHER; note = 2'-O-methyladenosine-3'-phosphate
  modified_base 13: mod_base = OTHER; note = 2'-O-methyluridine-3'-phosphate
  modified_base 14: mod_base = OTHER; note = 2'-O-methylcytidine-3'-phosphate
  modified_base 15: mod_base = OTHER; note = 2'-O-methylcytidine-3'-phosphate
  modified_base 16: mod_base = OTHER; note = 2'-O-methylcytidine-3'-phosphate
  modified_base 17: mod_base = OTHER; note = 2'-O-methylguanosine-3'-phosphate
  modified_base 18: mod_base = OTHER; note = 2'-O-methylguanosine-3'-phosphate
  modified_base 19: mod_base = OTHER; note = 2'-O-methyladenosine-3'-phosphorothioate
  modified_base 20: mod_base = OTHER; note = 2'-O-methyluridine-3'-phosphorothioate
  modified_base 21: mod_base = OTHER; note = 2'-O-methyladenosine
cagccagtagtatcccggata

SEQ ID NO: 1975 - RNA, 21 nt, synthetic construct
  source 1..21: mol_type = other RNA
  modified_base 1: mod_base = OTHER; note = 2'-O-methyluridine-3'-phosphorothioate
  modified_base 2: mod_base = OTHER; note = 2'-O-methyladenosine-3'-phosphorothioate
  modified_base 3: mod_base = OTHER; note = 2'-O-methylguanosine-3'-phosphate
  modified_base 4: mod_base = OTHER; note = 2'-O-methyluridine-3'-phosphate
  modified_base 5: mod_base = OTHER; note = 2'-O-methyladenosine-3'-phosphate
  modified_base 6: mod_base = OTHER; note = 2'-O-hexadecyl-uridine-3'-phosphate
  modified_base 7: mod_base = OTHER; note = 2'-deoxy-2'-fluorocytidine-3'-phosphate
  modified_base 8: mod_base = OTHER; note = 2'-O-methylcytidine-3'-phosphate
  modified_base 9: mod_base = OTHER; note = 2'-deoxy-2'-fluorocytidine-3'-phosphate
  modified_base 10: mod_base = OTHER; note = 2'-deoxy-2'-fluoroguanosine-3'-phosphate
  modified_base 11: mod_base = OTHER; note = 2'-deoxy-2'-fluoroguanosine-3'-phosphate
  modified_base 12: mod_base = OTHER; note = 2'-O-methyladenosine-3'-phosphate
  modified_base 13: mod_base = OTHER; note = 2'-O-methyluridine-3'-phosphate
  modified_base 14: mod_base = OTHER; note = 2'-O-methylguanosine-3'-phosphate
  modified_base 15: mod_base = OTHER; note = 2'-O-methylcytidine-3'-phosphate
  modified_base 16: mod_base = OTHER; note = 2'-O-methyluridine-3'-phosphate
  modified_base 17: mod_base = OTHER; note = 2'-O-methyluridine-3'-phosphate
  modified_base 18: mod_base = OTHER; note = 2'-O-methyluridine-3'-phosphate
  modified_base 19: mod_base = OTHER; note = 2'-O-methylcytidine-3'-phosphorothioate
  modified_base 20: mod_base = OTHER; note = 2'-O-methyluridine-3'-phosphorothioate
  modified_base 21: mod_base = OTHER; note = 2'-O-methyladenosine
tagtatcccggatgctttcta

SEQ ID NO: 1976 - RNA, 21 nt, synthetic construct
  source 1..21: mol_type = other RNA
  modified_base 1: mod_base = OTHER; note = 2'-O-methyluridine-3'-phosphorothioate
  modified_base 2: mod_base = OTHER; note = 2'-O-methylcytidine-3'-phosphorothioate
  modified_base 3: mod_base = OTHER; note = 2'-O-methylcytidine-3'-phosphate
  modified_base 4: mod_base = OTHER; note = 2'-O-methylcytidine-3'-phosphate
  modified_base 5: mod_base = OTHER; note = 2'-O-methylguanosine-3'-phosphate
  modified_base 6: mod_base = OTHER; note = 2'-O-hexadecyl-guanosine-3'-phosphate
  modified_base 7: mod_base = OTHER; note = 2'-deoxy-2'-fluoroadenosine-3'-phosphate
  modified_base 8: mod_base = OTHER; note = 2'-O-methyluridine-3'-phosphate
  modified_base 9: mod_base = OTHER; note = 2'-deoxy-2'-fluoroguanosine-3'-phosphate
  modified_base 10: mod_base = OTHER; note = 2'-deoxy-2'-fluorocytidine-3'-phosphate
  modified_base 11: mod_base = OTHER; note = 2'-deoxy-2'-fluorouridine-3'-phosphate
  modified_base 12: mod_base = OTHER; note = 2'-O-methyluridine-3'-phosphate
  modified_base 13: mod_base = OTHER; note = 2'-O-methyluridine-3'-phosphate
  modified_base 14: mod_base = OTHER; note = 2'-O-methylcytidine-3'-phosphate
  modified_base 15: mod_base = OTHER; note = 2'-O-methyluridine-3'-phosphate
  modified_base 16: mod_base = OTHER; note = 2'-O-methylguanosine-3'-phosphate
  modified_base 17: mod_base = OTHER; note = 2'-O-methylcytidine-3'-phosphate
  modified_base 18: mod_base = OTHER; note = 2'-O-methyluridine-3'-phosphate
  modified_base 19: mod_base = OTHER; note = 2'-O-methyluridine-3'-phosphorothioate
  modified_base 20: mod_base = OTHER; note = 2'-O-methylcytidine-3'-phosphorothioate
  modified_base 21: mod_base = OTHER; note = 2'-O-methyladenosine
tcccggatgctttctgcttca

SEQ ID NO: 1977 - RNA, 21 nt, synthetic construct
  source 1..21: mol_type = other RNA
  modified_base 1: mod_base = OTHER; note = 2'-O-methylguanosine-3'-phosphorothioate
  modified_base 2: mod_base = OTHER; note = 2'-O-methyladenosine-3'-phosphorothioate
  modified_base 3: mod_base = OTHER; note = 2'-O-methyluridine-3'-phosphate
  modified_base 4: mod_base = OTHER; note = 2'-O-methylguanosine-3'-phosphate
  modified_base 5: mod_base = OTHER; note = 2'-O-methylcytidine-3'-phosphate
  modified_base 6: mod_base = OTHER; note = 2'-O-hexadecyl-uridine-3'-phosphate
  modified_base 7: mod_base = OTHER; note = 2'-deoxy-2'-fluorouridine-3'-phosphate
  modified_base 8: mod_base = OTHER; note = 2'-O-methyluridine-3'-phosphate
  modified_base 9: mod_base = OTHER; note = 2'-deoxy-2'-fluorocytidine-3'-phosphate
  modified_base 10: mod_base = OTHER; note = 2'-deoxy-2'-fluorouridine-3'-phosphate
  modified_base 11: mod_base = OTHER; note = 2'-deoxy-2'-fluoroguanosine-3'-phosphate
  modified_base 12: mod_base = OTHER; note = 2'-O-methylcytidine-3'-phosphate
  modified_base 13: mod_base = OTHER; note = 2'-O-methyluridine-3'-phosphate
  modified_base 14: mod_base = OTHER; note = 2'-O-methyluridine-3'-phosphate
  modified_base 15: mod_base = OTHER; note = 2'-O-methylcytidine-3'-phosphate
  modified_base 16: mod_base = OTHER; note = 2'-O-methyladenosine-3'-phosphate
  modified_base 17: mod_base = OTHER; note = 2'-O-methylcytidine-3'-phosphate
  modified_base 18: mod_base = OTHER; note = 2'-O-methyluridine-3'-phosphate
  modified_base 19: mod_base = OTHER; note = 2'-O-methyluridine-3'-phosphorothioate
  modified_base 20: mod_base = OTHER; note = 2'-O-methyluridine-3'-phosphorothioate
  modified_base 21: mod_base = OTHER; note = 2'-O-methyladenosine
gatgctttctgcttcacttta

SEQ ID NO: 1978 - RNA, 21 nt, synthetic construct
  source 1..21: mol_type = other RNA
  modified_base 1: mod_base = OTHER; note = 2'-O-methyluridine-3'-phosphorothioate
  modified_base 2: mod_base = OTHER; note = 2'-O-methyluridine-3'-phosphorothioate
  modified_base 3: mod_base = OTHER; note = 2'-O-methyluridine-3'-phosphate
  modified_base 4: mod_base = OTHER; note = 2'-O-methylcytidine-3'-phosphate
  modified_base 5: mod_base = OTHER; note = 2'-O-methyluridine-3'-phosphate
  modified_base 6: mod_base = OTHER; note = 2'-O-hexadecyl-guanosine-3'-phosphate
  modified_base 7: mod_base = OTHER; note = 2'-deoxy-2'-fluorocytidine-3'-phosphate
  modified_base 8: mod_base = OTHER; note = 2'-O-methyluridine-3'-phosphate
  modified_base 9: mod_base = OTHER; note = 2'-deoxy-2'-fluorouridine-3'-phosphate
  modified_base 10: mod_base = OTHER; note = 2'-deoxy-2'-fluorocytidine-3'-phosphate
  modified_base 11: mod_base = OTHER; note = 2'-deoxy-2'-fluoroadenosine-3'-phosphate
  modified_base 12: mod_base = OTHER; note = 2'-O-methylcytidine-3'-phosphate
  modified_base 13: mod_base = OTHER; note = 2'-O-methyluridine-3'-phosphate
  modified_base 14: mod_base = OTHER; note = 2'-O-methyluridine-3'-phosphate
  modified_base 15: mod_base = OTHER; note = 2'-O-methyluridine-3'-phosphate
  modified_base 16: mod_base = OTHER; note = 2'-O-methylcytidine-3'-phosphate
  modified_base 17: mod_base = OTHER; note = 2'-O-methylcytidine-3'-phosphate
  modified_base 18: mod_base = OTHER; note = 2'-O-methyladenosine-3'-phosphate
  modified_base 19: mod_base = OTHER; note = 2'-O-methyluridine-3'-phosphorothioate
  modified_base 20: mod_base = OTHER; note = 2'-O-methylcytidine-3'-phosphorothioate
  modified_base 21: mod_base = OTHER; note = 2'-O-methyladenosine
tttctgcttcactttccatca

SEQ ID NO: 1979 - RNA, 21 nt, synthetic construct
  source 1..21: mol_type = other RNA
  modified_base 1: mod_base = OTHER; note = 2'-O-methylcytidine-3'-phosphorothioate
  modified_base 2: mod_base = OTHER; note = 2'-O-methyladenosine-3'-phosphorothioate
  modified_base 3: mod_base = OTHER; note = 2'-O-methylcytidine-3'-phosphate
  modified_base 4: mod_base = OTHER; note = 2'-O-methyluridine-3'-phosphate
  modified_base 5: mod_base = OTHER; note = 2'-O-methyluridine-3'-phosphate
  modified_base 6: mod_base = OTHER; note = 2'-O-hexadecyl-uridine-3'-phosphate
  modified_base 7: mod_base = OTHER; note = 2'-deoxy-2'-fluorocytidine-3'-phosphate
  modified_base 8: mod_base = OTHER; note = 2'-O-methylcytidine-3'-phosphate
  modified_base 9: mod_base = OTHER; note = 2'-deoxy-2'-fluoroadenosine-3'-phosphate
  modified_base 10: mod_base = OTHER; note = 2'-deoxy-2'-fluorouridine-3'-phosphate
  modified_base 11: mod_base = OTHER; note = 2'-deoxy-2'-fluorocytidine-3'-phosphate
  modified_base 12: mod_base = OTHER; note = 2'-O-methyluridine-3'-phosphate
  modified_base 13: mod_base = OTHER; note = 2'-O-methylcytidine-3'-phosphate
  modified_base 14: mod_base = OTHER; note = 2'-O-methyladenosine-3'-phosphate
  modified_base 15: mod_base = OTHER; note = 2'-O-methylcytidine-3'-phosphate
  modified_base 16: mod_base = OTHER; note = 2'-O-methylcytidine-3'-phosphate
  modified_base 17: mod_base = OTHER; note = 2'-O-methyladenosine-3'-phosphate
  modified_base 18: mod_base = OTHER; note = 2'-O-methylguanosine-3'-phosphate
  modified_base 19: mod_base = OTHER; note = 2'-O-methyluridine-3'-phosphorothioate
  modified_base 20: mod_base = OTHER; note = 2'-O-methyluridine-3'-phosphorothioate
  modified_base 21: mod_base = OTHER; note = 2'-O-methyladenosine
cactttccatctcaccagtta

SEQ ID NO: 1980 - RNA, 21 nt, synthetic construct
  source 1..21: mol_type = other RNA
  modified_base 1: mod_base = OTHER; note = 2'-O-methylcytidine-3'-phosphorothioate
  modified_base 2: mod_base = OTHER; note = 2'-O-methylcytidine-3'-phosphorothioate
  modified_base 3: mod_base = OTHER; note = 2'-O-methyladenosine-3'-phosphate
  modified_base 4: mod_base = OTHER; note = 2'-O-methyluridine-3'-phosphate
  modified_base 5: mod_base = OTHER; note = 2'-O-methylcytidine-3'-phosphate
  modified_base 6: mod_base = OTHER; note = 2'-O-hexadecyl-uridine-3'-phosphate
  modified_base 7: mod_base = OTHER; note = 2'-deoxy-2'-fluorocytidine-3'-phosphate
  modified_base 8: mod_base = OTHER; note = 2'-O-methyladenosine-3'-phosphate
  modified_base 9: mod_base = OTHER; note = 2'-deoxy-2'-fluorocytidine-3'-phosphate
  modified_base 10: mod_base = OTHER; note = 2'-deoxy-2'-fluorocytidine-3'-phosphate
  modified_base 11: mod_base = OTHER; note = 2'-deoxy-2'-fluoroadenosine-3'-phosphate
  modified_base 12: mod_base = OTHER; note = 2'-O-methylguanosine-3'-phosphate
  modified_base 13: mod_base = OTHER; note = 2'-O-methyluridine-3'-phosphate
  modified_base 14: mod_base = OTHER; note = 2'-O-methyluridine-3'-phosphate
  modified_base 15: mod_base = OTHER; note = 2'-O-methylcytidine-3'-phosphate
  modified_base 16: mod_base = OTHER; note = 2'-O-methyladenosine-3'-phosphate
  modified_base 17: mod_base = OTHER; note = 2'-O-methylguanosine-3'-phosphate
  modified_base 18: mod_base = OTHER; note = 2'-O-methylguanosine-3'-phosphate
  modified_base 19: mod_base = OTHER; note = 2'-O-methylcytidine-3'-phosphorothioate
  modified_base 20: mod_base = OTHER; note = 2'-O-methyluridine-3'-phosphorothioate
  modified_base 21: mod_base = OTHER; note = 2'-O-methyladenosine
ccatctcaccagttcaggcta

SEQ ID NO: 1981 - RNA, 21 nt, synthetic construct
  source 1..21: mol_type = other RNA
  modified_base 1: mod_base = OTHER; note = 2'-O-methyluridine-3'-phosphorothioate
  modified_base 2: mod_base = OTHER; note = 2'-O-methylcytidine-3'-phosphorothioate
  modified_base 3: mod_base = OTHER; note = 2'-O-methyladenosine-3'-phosphate
  modified_base 4: mod_base = OTHER; note = 2'-O-methylcytidine-3'-phosphate
  modified_base 5: mod_base = OTHER; note = 2'-O-methylcytidine-3'-phosphate
  modified_base 6: mod_base = OTHER; note = 2'-O-hexadecyl-adenosine-3'-phosphate
  modified_base 7: mod_base = OTHER; note = 2'-deoxy-2'-fluoroguanosine-3'-phosphate
  modified_base 8: mod_base = OTHER; note = 2'-O-methyluridine-3'-phosphate
  modified_base 9: mod_base = OTHER; note = 2'-deoxy-2'-fluorouridine-3'-phosphate
  modified_base 10: mod_base = OTHER; note = 2'-deoxy-2'-fluorocytidine-3'-phosphate
  modified_base 11: mod_base = OTHER; note = 2'-deoxy-2'-fluoroadenosine-3'-phosphate
  modified_base 12: mod_base = OTHER; note = 2'-O-methylguanosine-3'-phosphate
  modified_base 13: mod_base = OTHER; note = 2'-O-methylguanosine-3'-phosphate
  modified_base 14: mod_base = OTHER; note = 2'-O-methylcytidine-3'-phosphate
  modified_base 15: mod_base = OTHER; note = 2'-O-methyluridine-3'-phosphate
  modified_base 16: mod_base = OTHER; note = 2'-O-methyluridine-3'-phosphate
  modified_base 17: mod_base = OTHER; note = 2'-O-methylcytidine-3'-phosphate
  modified_base 18: mod_base = OTHER; note = 2'-O-methyladenosine-3'-phosphate
  modified_base 19: mod_base = OTHER; note = 2'-O-methyluridine-3'-phosphorothioate
  modified_base 20: mod_base = OTHER; note = 2'-O-methylcytidine-3'-phosphorothioate
  modified_base 21: mod_base = OTHER; note = 2'-O-methyladenosine
tcaccagttcaggcttcatca

SEQ ID NO: 1982 - RNA, 21 nt, synthetic construct
  source 1..21: mol_type = other RNA
  modified_base 1: mod_base = OTHER; note = 2'-O-methyladenosine-3'-phosphorothioate
  modified_base 2: mod_base = OTHER; note = 2'-O-methylguanosine-3'-phosphorothioate
  modified_base 3: mod_base = OTHER; note = 2'-O-methyluridine-3'-phosphate
  modified_base 4: mod_base = OTHER; note = 2'-O-methyluridine-3'-phosphate
  modified_base 5: mod_base = OTHER; note = 2'-O-methylcytidine-3'-phosphate
  modified_base 6: mod_base = OTHER; note = 2'-O-hexadecyl-adenosine-3'-phosphate
  modified_base 7: mod_base = OTHER; note = 2'-deoxy-2'-fluoroguanosine-3'-phosphate
  modified_base 8: mod_base = OTHER; note = 2'-O-methylguanosine-3'-phosphate
  modified_base 9: mod_base = OTHER; note = 2'-deoxy-2'-fluorocytidine-3'-phosphate
  modified_base 10: mod_base = OTHER; note = 2'-deoxy-2'-fluorouridine-3'-phosphate
  modified_base 11: mod_base = OTHER; note = 2'-deoxy-2'-fluorouridine-3'-phosphate
  modified_base 12: mod_base = OTHER; note = 2'-O-methylcytidine-3'-phosphate
  modified_base 13: mod_base = OTHER; note = 2'-O-methyladenosine-3'-phosphate
  modified_base 14: mod_base = OTHER; note = 2'-O-methyluridine-3'-phosphate
  modified_base 15: mod_base = OTHER; note = 2'-O-methylcytidine-3'-phosphate
  modified_base 16: mod_base = OTHER; note = 2'-O-methyladenosine-3'-phosphate
  modified_base 17: mod_base = OTHER; note = 2'-O-methyluridine-3'-phosphate
  modified_base 18: mod_base = OTHER; note = 2'-O-methylcytidine-3'-phosphate
  modified_base 19: mod_base = OTHER; note = 2'-O-methyladenosine-3'-phosphorothioate
  modified_base 20: mod_base = OTHER; note = 2'-O-methyluridine-3'-phosphorothioate
  modified_base 21: mod_base = OTHER; note = 2'-O-methyladenosine
agttcaggcttcatcatcata

SEQ ID NO: 1983 - RNA, 21 nt, synthetic construct
  source 1..21: mol_type = other RNA
  modified_base 1: mod_base = OTHER; note = 2'-O-methyladenosine-3'-phosphorothioate
  modified_base 2: mod_base = OTHER; note = 2'-O-methylguanosine-3'-phosphorothioate
  modified_base 3: mod_base = OTHER; note = 2'-O-methylguanosine-3'-phosphate
  modified_base 4: mod_base = OTHER; note = 2'-O-methylcytidine-3'-phosphate
  modified_base 5: mod_base = OTHER; note = 2'-O-methyluridine-3'-phosphate
  modified_base 6: mod_base = OTHER; note = 2'-O-hexadecyl-uridine-3'-phosphate
  modified_base 7: mod_base = OTHER; note = 2'-deoxy-2'-fluorocytidine-3'-phosphate
  modified_base 8: mod_base = OTHER; note = 2'-O-methyladenosine-3'-phosphate
  modified_base 9: mod_base = OTHER; note = 2'-deoxy-2'-fluorouridine-3'-phosphate
  modified_base 10: mod_base = OTHER; note = 2'-deoxy-2'-fluorocytidine-3'-phosphate
  modified_base 11: mod_base = OTHER; note = 2'-deoxy-2'-fluoroadenosine-3'-phosphate
  modified_base 12: mod_base = OTHER; note = 2'-O-methyluridine-3'-phosphate
  modified_base 13: mod_base = OTHER; note = 2'-O-methylcytidine-3'-phosphate
  modified_base 14: mod_base = OTHER; note = 2'-O-methyladenosine-3'-phosphate
  modified_base 15: mod_base = OTHER; note = 2'-O-methyluridine-3'-phosphate
  modified_base 16: mod_base = OTHER; note = 2'-O-methylguanosine-3'-phosphate
  modified_base 17: mod_base = OTHER; note = 2'-O-methyluridine-3'-phosphate
  modified_base 18: mod_base = OTHER; note = 2'-O-methylcytidine-3'-phosphate
  modified_base 19: mod_base = OTHER; note = 2'-O-methyluridine-3'-phosphorothioate
  modified_base 20: mod_base = OTHER; note = 2'-O-methylcytidine-3'-phosphorothioate
  modified_base 21: mod_base = OTHER; note = 2'-O-methyladenosine
aggcttcatcatcatgtctca

SEQ ID NO: 1984 - RNA, 21 nt, synthetic construct
  source 1..21: mol_type = other RNA
  modified_base 1: mod_base = OTHER; note = 2'-O-methyluridine-3'-phosphorothioate
  modified_base 2: mod_base = OTHER; note = 2'-O-methylcytidine-3'-phosphorothioate
  modified_base 3: mod_base = OTHER; note = 2'-O-methyladenosine-3'-phosphate
  modified_base 4: mod_base = OTHER; note = 2'-O-methyluridine-3'-phosphate
  modified_base 5: mod_base = OTHER; note = 2'-O-methylcytidine-3'-phosphate
  modified_base 6: mod_base = OTHER; note = 2'-O-hexadecyl-adenosine-3'-phosphate
  modified_base 7: mod_base = OTHER; note = 2'-deoxy-2'-fluorouridine-3'-phosphate
  modified_base 8: mod_base = OTHER; note = 2'-O-methylcytidine-3'-phosphate
  modified_base 9: mod_base = OTHER; note = 2'-deoxy-2'-fluoroadenosine-3'-phosphate
  modified_base 10: mod_base = OTHER; note = 2'-deoxy-2'-fluorouridine-3'-phosphate
  modified_base 11: mod_base = OTHER; note = 2'-deoxy-2'-fluoroguanosine-3'-phosphate
  modified_base 12: mod_base = OTHER; note = 2'-O-methyluridine-3'-phosphate
  modified_base 13: mod_base = OTHER; note = 2'-O-methylcytidine-3'-phosphate
  modified_base 14: mod_base = OTHER; note = 2'-O-methyluridine-3'-phosphate
  modified_base 15: mod_base = OTHER; note = 2'-O-methylcytidine-3'-phosphate
  modified_base 16: mod_base = OTHER; note = 2'-O-methyluridine-3'-phosphate
  modified_base 17: mod_base = OTHER; note = 2'-O-methylguanosine-3'-phosphate
  modified_base 18: mod_base = OTHER; note = 2'-O-methyladenosine-3'-phosphate
  modified_base 19: mod_base = OTHER; note = 2'-O-methyladenosine-3'-phosphorothioate
  modified_base 20: mod_base = OTHER; note = 2'-O-methylguanosine-3'-phosphorothioate
  modified_base 21: mod_base = OTHER; note = 2'-O-methyladenosine
tcatcatcatgtctctgaaga

SEQ ID NO: 1985 - RNA, 21 nt, synthetic construct
  source 1..21: mol_type = other RNA
  modified_base 1: mod_base = OTHER; note = 2'-O-methyladenosine-3'-phosphorothioate
  modified_base 2: mod_base = OTHER; note = 2'-O-methyluridine-3'-phosphorothioate
  modified_base 3: mod_base = OTHER; note = 2'-O-methylcytidine-3'-phosphate
  modified_base 4: mod_base = OTHER; note = 2'-O-methyladenosine-3'-phosphate
  modified_base 5: mod_base = OTHER; note = 2'-O-methyluridine-3'-phosphate
  modified_base 6: mod_base = OTHER; note = 2'-O-hexadecyl-guanosine-3'-phosphate
  modified_base 7: mod_base = OTHER; note = 2'-deoxy-2'-fluorouridine-3'-phosphate
  modified_base 8: mod_base = OTHER; note = 2'-O-methylcytidine-3'-phosphate
  modified_base 9: mod_base = OTHER; note = 2'-deoxy-2'-fluorouridine-3'-phosphate
  modified_base 10: mod_base = OTHER; note = 2'-deoxy-2'-fluorocytidine-3'-phosphate
  modified_base 11: mod_base = OTHER; note = 2'-deoxy-2'-fluorouridine-3'-phosphate
  modified_base 12: mod_base = OTHER; note = 2'-O-methylguanosine-3'-phosphate
  modified_base 13: mod_base = OTHER; note = 2'-O-methyladenosine-3'-phosphate
  modified_base 14: mod_base = OTHER; note = 2'-O-methyladenosine-3'-phosphate
  modified_base 15: mod_base = OTHER; note = 2'-O-methylguanosine-3'-phosphate
  modified_base 16: mod_base = OTHER; note = 2'-O-methyladenosine-3'-phosphate
  modified_base 17: mod_base = OTHER; note = 2'-O-methylcytidine-3'-phosphate
  modified_base 18: mod_base = OTHER; note = 2'-O-methyladenosine-3'-phosphate
  modified_base 19: mod_base = OTHER; note = 2'-O-methylguanosine-3'-phosphorothioate
  modified_base 20: mod_base = OTHER; note = 2'-O-methyluridine-3'-phosphorothioate
  modified_base 21: mod_base = OTHER; note = 2'-O-methyladenosine
atcatgtctctgaagacagta

SEQ ID NO: 1986 - RNA, 21 nt, synthetic construct
  source 1..21: mol_type = other RNA
  modified_base 1: mod_base = OTHER; note = 2'-O-methyluridine-3'-phosphorothioate
  modified_base 2: mod_base = OTHER; note = 2'-O-methylcytidine-3'-phosphorothioate
  modified_base 3: mod_base = OTHER; note = 2'-O-methyluridine-3'-phosphate
  modified_base 4: mod_base = OTHER; note = 2'-O-methylcytidine-3'-phosphate
  modified_base 5: mod_base = OTHER; note = 2'-O-methyluridine-3'-phosphate
  modified_base 6: mod_base = OTHER; note = 2'-O-hexadecyl-guanosine-3'-phosphate
  modified_base 7: mod_base = OTHER; note = 2'-deoxy-2'-fluoroadenosine-3'-phosphate
  modified_base 8: mod_base = OTHER; note = 2'-O-methyladenosine-3'-phosphate
  modified_base 9: mod_base = OTHER; note = 2'-deoxy-2'-fluoroguanosine-3'-phosphate
  modified_base 10: mod_base = OTHER; note = 2'-deoxy-2'-fluoroadenosine-3'-phosphate
  modified_base 11: mod_base = OTHER; note = 2'-deoxy-2'-fluorocytidine-3'-phosphate
  modified_base 12: mod_base = OTHER; note = 2'-O-methyladenosine-3'-phosphate
  modified_base 13: mod_base = OTHER; note = 2'-O-methylguanosine-3'-phosphate
  modified_base 14: mod_base = OTHER; note = 2'-O-methyluridine-3'-phosphate
  modified_base 15: mod_base = OTHER; note = 2'-O-methylguanosine-3'-phosphate
  modified_base 16: mod_base = OTHER; note = 2'-O-methylguanosine-3'-phosphate
  modified_base 17: mod_base = OTHER; note = 2'-O-methylcytidine-3'-phosphate
  modified_base 18: mod_base = OTHER; note = 2'-O-methyladenosine-3'-phosphate
  modified_base 19: mod_base = OTHER; note = 2'-O-methylguanosine-3'-phosphorothioate
  modified_base 20: mod_base = OTHER; note = 2'-O-methyluridine-3'-phosphorothioate
  modified_base 21: mod_base = OTHER; note = 2'-O-methyladenosine
tctctgaagacagtggcagta

SEQ ID NO: 1987 - RNA, 21 nt, synthetic construct
  source 1..21: mol_type = other RNA
  modified_base 1: mod_base = OTHER; note = 2'-O-methyladenosine-3'-phosphorothioate
  modified_base 2: mod_base = OTHER; note = 2'-O-methylguanosine-3'-phosphorothioate
  modified_base 3: mod_base = OTHER; note = 2'-O-methyluridine-3'-phosphate
  modified_base 4: mod_base = OTHER; note = 2'-O-methylguanosine-3'-phosphate
  modified_base 5: mod_base = OTHER; note = 2'-O-methylguanosine-3'-phosphate
  modified_base 6: mod_base = OTHER; note = 2'-O-hexadecyl-cytidine-3'-phosphate
  modified_base 7: mod_base = OTHER; note = 2'-deoxy-2'-fluoroadenosine-3'-phosphate
  modified_base 8: mod_base = OTHER; note = 2'-O-methylguanosine-3'-phosphate
  modified_base 9: mod_base = OTHER; note = 2'-deoxy-2'-fluorouridine-3'-phosphate
  modified_base 10: mod_base = OTHER; note = 2'-deoxy-2'-fluoroguanosine-3'-phosphate
  modified_base 11: mod_base = OTHER; note = 2'-deoxy-2'-fluoroadenosine-3'-phosphate
  modified_base 12: mod_base = OTHER; note = 2'-O-methyluridine-3'-phosphate
  modified_base 13: mod_base = OTHER; note = 2'-O-methylcytidine-3'-phosphate
  modified_base 14: mod_base = OTHER; note = 2'-O-methylguanosine-3'-phosphate
  modified_base 15: mod_base = OTHER; note = 2'-O-methylcytidine-3'-phosphate
  modified_base 16: mod_base = OTHER; note = 2'-O-methylcytidine-3'-phosphate
  modified_base 17: mod_base = OTHER; note = 2'-O-methylcytidine-3'-phosphate
  modified_base 18: mod_base = OTHER; note = 2'-O-methyluridine-3'-phosphate
  modified_base 19: mod_base = OTHER; note = 2'-O-methylguanosine-3'-phosphorothioate
  modified_base 20: mod_base = OTHER; note = 2'-O-methylcytidine-3'-phosphorothioate
  modified_base 21: mod_base = OTHER; note = 2'-O-methyladenosine
agtggcagtgatcgccctgca

SEQ ID NO: 1988 - RNA, 21 nt, synthetic construct
  source 1..21: mol_type = other RNA
  modified_base 1: mod_base = OTHER; note = 2'-O-methylcytidine-3'-phosphorothioate
  modified_base 2: mod_base = OTHER; note = 2'-O-methyladenosine-3'-phosphorothioate
  modified_base 3: mod_base = OTHER; note = 2'-O-methylcytidine-3'-phosphate
  modified_base 4: mod_base = OTHER; note = 2'-O-methylcytidine-3'-phosphate
  modified_base 5: mod_base = OTHER; note = 2'-O-methylguanosine-3'-phosphate
  modified_base 6: mod_base = OTHER; note = 2'-O-hexadecyl-guanosine-3'-phosphate
  modified_base 7: mod_base = OTHER; note = 2'-deoxy-2'-fluorocytidine-3'-phosphate
  modified_base 8: mod_base = OTHER; note = 2'-O-methyluridine-3'-phosphate
  modified_base 9: mod_base = OTHER; note = 2'-deoxy-2'-fluorocytidine-3'-phosphate
  modified_base 10: mod_base = OTHER; note = 2'-deoxy-2'-fluorocytidine-3'-phosphate
  modified_base 11: mod_base = OTHER; note = 2'-deoxy-2'-fluoroguanosine-3'-phosphate
  modified_base 12: mod_base = OTHER; note = 2'-O-methylguanosine-3'-phosphate
  modified_base 13: mod_base = OTHER; note = 2'-O-methyladenosine-3'-phosphate
  modified_base 14: mod_base = OTHER; note = 2'-O-methyluridine-3'-phosphate
  modified_base 15: mod_base = OTHER; note = 2'-O-methylguanosine-3'-phosphate
  modified_base 16: mod_base = OTHER; note = 2'-O-methylguanosine-3'-phosphate
  modified_base 17: mod_base = OTHER; note = 2'-O-methyluridine-3'-phosphate
  modified_base 18: mod_base = OTHER; note = 2'-O-methylguanosine-3'-phosphate
  modified_base 19: mod_base = OTHER; note = 2'-O-methyluridine-3'-phosphorothioate
  modified_base 20: mod_base = OTHER; note = 2'-O-methyluridine-3'-phosphorothioate
  modified_base 21: mod_base = OTHER; note = 2'-O-methyladenosine
caccggctccggatggtgtta

SEQ ID NO: 1989 - RNA, 21 nt, synthetic construct
  source 1..21: mol_type = other RNA
  modified_base 1: mod_base = OTHER; note = 2'-O-methyladenosine-3'-phosphorothioate
  modified_base 2: mod_base = OTHER; note = 2'-O-methylcytidine-3'-phosphorothioate
  modified_base 3: mod_base = OTHER; note = 2'-O-methyladenosine-3'-phosphate
  modified_base 4: mod_base = OTHER; note = 2'-O-methylguanosine-3'-phosphate
  modified_base 5: mod_base = OTHER; note = 2'-O-methylcytidine-3'-phosphate
  modified_base 6: mod_base = OTHER; note = 2'-O-hexadecyl-cytidine-3'-phosphate
  modified_base 7: mod_base = OTHER; note = 2'-deoxy-2'-fluorouridine-3'-phosphate
  modified_base 8: mod_base = OTHER; note = 2'-O-methyladenosine-3'-phosphate
  modified_base 9: mod_base = OTHER; note = 2'-deoxy-2'-fluoroadenosine-3'-phosphate
  modified_base 10: mod_base = OTHER; note = 2'-deoxy-2'-fluorouridine-3'-phosphate
  modified_base 11: mod_base = OTHER; note = 2'-deoxy-2'-fluorocytidine-3'-phosphate
  modified_base 12: mod_base = OTHER; note = 2'-O-methylguanosine-3'-phosphate
  modified_base 13: mod_base = OTHER; note = 2'-O-methylcytidine-3'-phosphate
  modified_base 14: mod_base = OTHER; note = 2'-O-methyladenosine-3'-phosphate
  modified_base 15: mod_base = OTHER; note = 2'-O-methylcytidine-3'-phosphate
  modified_base 16: mod_base = OTHER; note = 2'-O-methylguanosine-3'-phosphate
  modified_base 17: mod_base = OTHER; note = 2'-O-methylguanosine-3'-phosphate
  modified_base 18: mod_base = OTHER; note = 2'-O-methylcytidine-3'-phosphate
  modified_base 19: mod_base = OTHER; note = 2'-O-methylcytidine-3'-phosphorothioate
  modified_base 20: mod_base = OTHER; note = 2'-O-methyluridine-3'-phosphorothioate
  modified_base 21: mod_base = OTHER; note = 2'-O-methyladenosine
acagcctaatcgcacggccta

SEQ ID NO: 1990 - RNA, 21 nt, synthetic construct
  source 1..21: mol_type = other RNA
  modified_base 1: mod_base = OTHER; note = 2'-O-methylcytidine-3'-phosphorothioate
  modified_base 2: mod_base = OTHER; note = 2'-O-methyluridine-3'-phosphorothioate
  modified_base 3: mod_base = OTHER; note = 2'-O-methyladenosine-3'-phosphate
  modified_base 4: mod_base = OTHER; note = 2'-O-methyladenosine-3'-phosphate
  modified_base 5: mod_base = OTHER; note = 2'-O-methyluridine-3'-phosphate
  modified_base 6: mod_base = OTHER; note = 2'-O-hexadecyl-cytidine-3'-phosphate
  modified_base 7: mod_base = OTHER; note = 2'-deoxy-2'-fluoroguanosine-3'-phosphate
  modified_base 8: mod_base = OTHER; note = 2'-O-methylcytidine-3'-phosphate
  modified_base 9: mod_base = OTHER; note = 2'-deoxy-2'-fluoroadenosine-3'-phosphate
  modified_base 10: mod_base = OTHER; note = 2'-deoxy-2'-fluorocytidine-3'-phosphate
  modified_base 11: mod_base = OTHER; note = 2'-deoxy-2'-fluoroguanosine-3'-phosphate
  modified_base 12: mod_base = OTHER; note = 2'-O-methylguanosine-3'-phosphate
  modified_base 13: mod_base = OTHER; note = 2'-O-methylcytidine-3'-phosphate
  modified_base 14: mod_base = OTHER; note = 2'-O-methylcytidine-3'-phosphate
  modified_base 15: mod_base = OTHER; note = 2'-O-methyluridine-3'-phosphate
  modified_base 16: mod_base = OTHER; note = 2'-O-methylcytidine-3'-phosphate
  modified_base 17: mod_base = OTHER; note = 2'-O-methylcytidine-3'-phosphate
  modified_base 18: mod_base = OTHER; note = 2'-O-methyluridine-3'-phosphate
  modified_base 19: mod_base = OTHER; note = 2'-O-methyluridine-3'-phosphorothioate
  modified_base 20: mod_base = OTHER; note = 2'-O-methyluridine-3'-phosphorothioate
  modified_base 21: mod_base = OTHER; note = 2'-O-methyladenosine
ctaatcgcacggcctccttta

SEQ ID NO: 1991 - RNA, 21 nt, synthetic construct
  source 1..21: mol_type = other RNA
  modified_base 1: mod_base = OTHER; note = 2'-O-methylcytidine-3'-phosphorothioate
  modified_base 2: mod_base = OTHER; note = 2'-O-methylguanosine-3'-phosphorothioate
  modified_base 3: mod_base = OTHER; note = 2'-O-methylcytidine-3'-phosphate
  modified_base 4: mod_base = OTHER; note = 2'-O-methyladenosine-3'-phosphate
  modified_base 5: mod_base = OTHER; note = 2'-O-methylcytidine-3'-phosphate
  modified_base 6: mod_base = OTHER; note = 2'-O-hexadecyl-guanosine-3'-phosphate
  modified_base 7: mod_base = OTHER; note = 2'-deoxy-2'-fluoroguanosine-3'-phosphate
  modified_base 8: mod_base = OTHER; note = 2'-O-methylcytidine-3'-phosphate
  modified_base 9: mod_base = OTHER; note = 2'-deoxy-2'-fluorocytidine-3'-phosphate
  modified_base 10: mod_base = OTHER; note = 2'-deoxy-2'-fluorouridine-3'-phosphate
  modified_base 11: mod_base = OTHER; note = 2'-deoxy-2'-fluorocytidine-3'-phosphate
  modified_base 12: mod_base = OTHER; note = 2'-O-methylcytidine-3'-phosphate
  modified_base 13: mod_base = OTHER; note = 2'-O-methyluridine-3'-phosphate
  modified_base 14: mod_base = OTHER; note = 2'-O-methyluridine-3'-phosphate
  modified_base 15: mod_base = OTHER; note = 2'-O-methyluridine-3'-phosphate
  modified_base 16: mod_base = OTHER; note = 2'-O-methylcytidine-3'-phosphate
  modified_base 17: mod_base = OTHER; note = 2'-O-methylcytidine-3'-phosphate
  modified_base 18: mod_base = OTHER; note = 2'-O-methylcytidine-3'-phosphate
  modified_base 19: mod_base = OTHER; note = 2'-O-methyluridine-3'-phosphorothioate
  modified_base 20: mod_base = OTHER; note = 2'-O-methylguanosine-3'-phosphorothioate
  modified_base 21: mod_base = OTHER; note = 2'-O-methyladenosine
cgcacggcctcctttccctga

SEQ ID NO: 1992 - RNA, 21 nt, synthetic construct
  source 1..21: mol_type = other RNA
  modified_base 1: mod_base = OTHER; note = 2'-O-methylcytidine-3'-phosphorothioate
  modified_base 2: mod_base = OTHER; note = 2'-O-methylcytidine-3'-phosphorothioate
  modified_base 3: mod_base = OTHER; note = 2'-O-methyluridine-3'-phosphate
  modified_base 4: mod_base = OTHER; note = 2'-O-methylcytidine-3'-phosphate
  modified_base 5: mod_base = OTHER; note = 2'-O-methylcytidine-3'-phosphate
  modified_base 6: mod_base = OTHER; note = 2'-O-hexadecyl-uridine-3'-phosphate
  modified_base 7: mod_base = OTHER; note = 2'-deoxy-2'-fluorouridine-3'-phosphate
  modified_base 8: mod_base = OTHER; note = 2'-O-methyluridine-3'-phosphate
  modified_base 9: mod_base = OTHER; note = 2'-deoxy-2'-fluorocytidine-3'-phosphate
  modified_base 10: mod_base = OTHER; note = 2'-deoxy-2'-fluorocytidine-3'-phosphate
  modified_base 11: mod_base = OTHER; note = 2'-deoxy-2'-fluorocytidine-3'-phosphate
  modified_base 12: mod_base = OTHER; note = 2'-O-methyluridine-3'-phosphate
  modified_base 13: mod_base = OTHER; note = 2'-O-methylguanosine-3'-phosphate
  modified_base 14: mod_base = OTHER; note = 2'-O-methylcytidine-3'-phosphate
  modified_base 15: mod_base = OTHER; note = 2'-O-methyladenosine-3'-phosphate
  modified_base 16: mod_base = OTHER; note = 2'-O-methylcytidine-3'-phosphate
  modified_base 17: mod_base = OTHER; note = 2'-O-methylcytidine-3'-phosphate
  modified_base 18: mod_base = OTHER; note = 2'-O-methylguanosine-3'-phosphate
  modified_base 19: mod_base = OTHER; note = 2'-O-methyluridine-3'-phosphorothioate
  modified_base 20: mod_base = OTHER; note = 2'-O-methyladenosine-3'-phosphorothioate
  modified_base 21: mod_base = OTHER; note = 2'-O-methyladenosine
cctcctttccctgcaccgtaa

SEQ ID NO: 1993 - RNA, 21 nt, synthetic construct
  source 1..21: mol_type = other RNA
  modified_base 1: mod_base = OTHER; note = 2'-O-methyluridine-3'-phosphorothioate
  modified_base 2: mod_base = OTHER; note = 2'-O-methyluridine-3'-phosphorothioate
  modified_base 3: mod_base = OTHER; note = 2'-O-methyluridine-3'-phosphate
  modified_base 4: mod_base = OTHER; note = 2'-O-methylcytidine-3'-phosphate
  modified_base 5: mod_base = OTHER; note = 2'-O-methylcytidine-3'-phosphate
  modified_base 6: mod_base = OTHER; note = 2'-O-hexadecyl-cytidine-3'-phosphate
  modified_base 7: mod_base = OTHER; note = 2'-deoxy-2'-fluorouridine-3'-phosphate
  modified_base 8: mod_base = OTHER; note = 2'-O-methylguanosine-3'-phosphate
  modified_base 9: mod_base = OTHER; note = 2'-deoxy-2'-fluorocytidine-3'-phosphate
  modified_base 10: mod_base = OTHER; note = 2'-deoxy-2'-fluoroadenosine-3'-phosphate
  modified_base 11: mod_base = OTHER; note = 2'-deoxy-2'-fluorocytidine-3'-phosphate
  modified_base 12: mod_base = OTHER; note = 2'-O-methylcytidine-3'-phosphate
  modified_base 13: mod_base = OTHER; note = 2'-O-methylguanosine-3'-phosphate
  modified_base 14: mod_base = OTHER; note = 2'-O-methyluridine-3'-phosphate
  modified_base 15: mod_base = OTHER; note = 2'-O-methyladenosine-3'-phosphate
  modified_base 16: mod_base = OTHER; note = 2'-O-methylcytidine-3'-phosphate
  modified_base 17: mod_base = OTHER; note = 2'-O-methyluridine-3'-phosphate
  modified_base 18: mod_base = OTHER; note = 2'-O-methylcytidine-3'-phosphate
  modified_base 19: mod_base = OTHER; note = 2'-O-methylcytidine-3'-phosphorothioate
  modified_base 20: mod_base = OTHER; note = 2'-O-methyluridine-3'-phosphorothioate
  modified_base 21: mod_base = OTHER; note = 2'-O-methyladenosine
tttccctgcaccgtactccta

SEQ ID NO: 1994 - RNA, 21 nt, synthetic construct
  source 1..21: mol_type = other RNA
  modified_base 1: mod_base = OTHER; note = 2'-O-methyluridine-3'-phosphorothioate
  modified_base 2: mod_base = OTHER; note = 2'-O-methylguanosine-3'-phosphorothioate
  modified_base 3: mod_base = OTHER; note = 2'-O-methylcytidine-3'-phosphate
  modified_base 4: mod_base = OTHER; note = 2'-O-methyladenosine-3'-phosphate
  modified_base 5: mod_base = OTHER; note = 2'-O-methylcytidine-3'-phosphate
  modified_base 6: mod_base = OTHER; note = 2'-O-hexadecyl-cytidine-3'-phosphate
  modified_base 7: mod_base = OTHER; note = 2'-deoxy-2'-fluoroguanosine-3'-phosphate
  modified_base 8: mod_base = OTHER; note = 2'-O-methyluridine-3'-phosphate
  modified_base 9: mod_base = OTHER; note = 2'-deoxy-2'-fluoroadenosine-3'-phosphate
  modified_base 10: mod_base = OTHER; note = 2'-deoxy-2'-fluorocytidine-3'-phosphate
  modified_base 11: mod_base = OTHER; note = 2'-deoxy-2'-fluorouridine-3'-phosphate
  modified_base 12: mod_base = OTHER; note = 2'-O-methylcytidine-3'-phosphate
  modified_base 13: mod_base = OTHER; note = 2'-O-methylcytidine-3'-phosphate
  modified_base 14: mod_base = OTHER; note = 2'-O-methyluridine-3'-phosphate
  modified_base 15: mod_base = OTHER; note = 2'-O-methylcytidine-3'-phosphate
  modified_base 16: mod_base = OTHER; note = 2'-O-methyladenosine-3'-phosphate
  modified_base 17: mod_base = OTHER; note = 2'-O-methylcytidine-3'-phosphate
  modified_base 18: mod_base = OTHER; note = 2'-O-methylcytidine-3'-phosphate
  modified_base 19: mod_base = OTHER; note = 2'-O-methylcytidine-3'-phosphorothioate
  modified_base 20: mod_base = OTHER; note = 2'-O-methyluridine-3'-phosphorothioate
  modified_base 21: mod_base = OTHER; note = 2'-O-methyladenosine
tgcaccgtactcctcacccta

SEQ ID NO: 1995 - RNA, 21 nt, synthetic construct
  source 1..21: mol_type = other RNA
  modified_base 1: mod_base = OTHER; note = 2'-O-methyladenosine-3'-phosphorothioate
  modified_base 2: mod_base = OTHER; note = 2'-O-methylcytidine-3'-phosphorothioate
  modified_base 3: mod_base = OTHER; note = 2'-O-methyluridine-3'-phosphate
  modified_base 4: mod_base = OTHER; note = 2'-O-methylcytidine-3'-phosphate
  modified_base 5: mod_base = OTHER; note = 2'-O-methylcytidine-3'-phosphate
  modified_base 6: mod_base = OTHER; note = 2'-O-hexadecyl-uridine-3'-phosphate
  modified_base 7: mod_base = OTHER; note = 2'-deoxy-2'-fluorocytidine-3'-phosphate
  modified_base 8: mod_base = OTHER; note = 2'-O-methyladenosine-3'-phosphate
  modified_base 9: mod_base = OTHER; note = 2'-deoxy-2'-fluorocytidine-3'-phosphate
  modified_base 10: mod_base = OTHER; note = 2'-deoxy-2'-fluorocytidine-3'-phosphate
  modified_base 11: mod_base = OTHER; note = 2'-deoxy-2'-fluorocytidine-3'-phosphate
  modified_base 12: mod_base = OTHER; note = 2'-O-methyluridine-3'-phosphate
  modified_base 13: mod_base = OTHER; note = 2'-O-methylguanosine-3'-phosphate
  modified_base 14: mod_base = OTHER; note = 2'-O-methylcytidine-3'-phosphate
  modified_base 15: mod_base = OTHER; note = 2'-O-methyluridine-3'-phosphate
  modified_base 16: mod_base = OTHER; note = 2'-O-methyluridine-3'-phosphate
  modified_base 17: mod_base = OTHER; note = 2'-O-methylcytidine-3'-phosphate
  modified_base 18: mod_base = OTHER; note = 2'-O-methyluridine-3'-phosphate
  modified_base 19: mod_base = OTHER; note = 2'-O-methylcytidine-3'-phosphorothioate
  modified_base 20: mod_base = OTHER; note = 2'-O-methyluridine-3'-phosphorothioate
  modified_base 21: mod_base = OTHER; note = 2'-O-methyladenosine
actcctcaccctgcttctcta

SEQ ID NO: 1996 - RNA, 21 nt, synthetic construct
  source 1..21: mol_type = other RNA
  modified_base 1: mod_base = OTHER; note = 2'-O-methyladenosine-3'-phosphorothioate
  modified_base 2: mod_base = OTHER; note = 2'-O-methylcytidine-3'-phosphorothioate
  modified_base 3: mod_base = OTHER; note = 2'-O-methylcytidine-3'-phosphate
  modified_base 4: mod_base = OTHER; note = 2'-O-methylcytidine-3'-phosphate
  modified_base 5: mod_base = OTHER; note = 2'-O-methyluridine-3'-phosphate
  modified_base 6: mod_base = OTHER; note = 2'-O-hexadecyl-guanosine-3'-phosphate
  modified_base 7: mod_base = OTHER; note = 2'-deoxy-2'-fluorocytidine-3'-phosphate
  modified_base 8: mod_base = OTHER; note = 2'-O-methyluridine-3'-phosphate
  modified_base 9: mod_base = OTHER; note = 2'-deoxy-2'-fluorouridine-3'-phosphate
  modified_base 10: mod_base = OTHER; note = 2'-deoxy-2'-fluorocytidine-3'-phosphate
  modified_base 11: mod_base = OTHER; note = 2'-deoxy-2'-fluorouridine-3'-phosphate
  modified_base 12: mod_base = OTHER; note = 2'-O-methylcytidine-3'-phosphate
  modified_base 13: mod_base = OTHER; note = 2'-O-methyluridine-3'-phosphate
  modified_base 14: mod_base = OTHER; note = 2'-O-methylguanosine-3'-phosphate
  modified_base 15: mod_base = OTHER; note = 2'-O-methylguanosine-3'-phosphate
  modified_base 16: mod_base = OTHER; note = 2'-O-methylguanosine-3'-phosphate
  modified_base 17: mod_base = OTHER; note = 2'-O-methylcytidine-3'-phosphate
  modified_base 18: mod_base = OTHER; note = 2'-O-methylcytidine-3'-phosphate
  modified_base 19: mod_base = OTHER; note = 2'-O-methyladenosine-3'-phosphorothioate
  modified_base 20: mod_base = OTHER; note = 2'-O-methylcytidine-3'-phosphorothioate
  modified_base 21: mod_base = OTHER; note = 2'-O-methyladenosine
accctgcttctctgggccaca

SEQ ID NO: 1997 - RNA, 21 nt, synthetic construct
  source 1..21: mol_type = other RNA
  modified_base 1: mod_base = OTHER; note = 2'-O-methylcytidine-3'-phosphorothioate
  modified_base 2: mod_base = OTHER; note = 2'-O-methyluridine-3'-phosphorothioate
  modified_base 3: mod_base = OTHER; note = 2'-O-methyluridine-3'-phosphate
  modified_base 4: mod_base = OTHER; note = 2'-O-methylcytidine-3'-phosphate
  modified_base 5: mod_base = OTHER; note = 2'-O-methyluridine-3'-phosphate
  modified_base 6: mod_base = OTHER; note = 2'-O-hexadecyl-cytidine-3'-phosphate
  modified_base 7: mod_base = OTHER; note = 2'-deoxy-2'-fluorouridine-3'-phosphate
  modified_base 8: mod_base = OTHER; note = 2'-O-methylguanosine-3'-phosphate
  modified_base 9: mod_base = OTHER; note = 2'-deoxy-2'-fluoroguanosine-3'-phosphate
  modified_base 10: mod_base = OTHER; note = 2'-deoxy-2'-fluoroguanosine-3'-phosphate
  modified_base 11: mod_base = OTHER; note = 2'-deoxy-2'-fluorocytidine-3'-phosphate
  modified_base 12: mod_base = OTHER; note = 2'-O-methylcytidine-3'-phosphate
  modified_base 13: mod_base = OTHER; note = 2'-O-methyladenosine-3'-phosphate
  modified_base 14: mod_base = OTHER; note = 2'-O-methylcytidine-3'-phosphate
  modified_base 15: mod_base = OTHER; note = 2'-O-methylcytidine-3'-phosphate
  modified_base 16: mod_base = OTHER; note = 2'-O-methyladenosine-3'-phosphate
  modified_base 17: mod_base = OTHER; note = 2'-O-methylguanosine-3'-phosphate
  modified_base 18: mod_base = OTHER; note = 2'-O-methyluridine-3'-phosphate
  modified_base 19: mod_base = OTHER; note = 2'-O-methyluridine-3'-phosphorothioate
  modified_base 20: mod_base = OTHER; note = 2'-O-methyluridine-3'-phosphorothioate
  modified_base 21: mod_base = OTHER; note = 2'-O-methyladenosine
cttctctgggccaccagttta

SEQ ID NO: 1998 - RNA, 21 nt, synthetic construct
  source 1..21: mol_type = other RNA
  modified_base 1: mod_base = OTHER; note = 2'-O-methylcytidine-3'-phosphorothioate
  modified_base 2: mod_base = OTHER; note = 2'-O-methyluridine-3'-phosphorothioate
  modified_base 3: mod_base = OTHER; note = 2'-O-methylguanosine-3'-phosphate
  modified_base 4: mod_base = OTHER; note = 2'-O-methylguanosine-3'-phosphate
  modified_base 5: mod_base = OTHER; note = 2'-O-methylguanosine-3'-phosphate
  modified_base 6: mod_base = OTHER; note = 2'-O-hexadecyl-cytidine-3'-phosphate
  modified_base 7: mod_base = OTHER; note = 2'-deoxy-2'-fluorocytidine-3'-phosphate
  modified_base 8: mod_base = OTHER; note = 2'-O-methyladenosine-3'-phosphate
  modified_base 9: mod_base = OTHER; note = 2'-deoxy-2'-fluorocytidine-3'-phosphate
  modified_base 10: mod_base = OTHER; note = 2'-deoxy-2'-fluorocytidine-3'-phosphate
  modified_base 11: mod_base = OTHER; note = 2'-deoxy-2'-fluoroadenosine-3'-phosphate
  modified_base 12: mod_base = OTHER; note = 2'-O-methylguanosine-3'-phosphate
  modified_base 13: mod_base = OTHER; note = 2'-O-methyluridine-3'-phosphate
  modified_base 14: mod_base = OTHER; note = 2'-O-methyluridine-3'-phosphate
  modified_base 15: mod_base = OTHER; note = 2'-O-methyluridine-3'-phosphate
  modified_base 16: mod_base = OTHER; note = 2'-O-methylcytidine-3'-phosphate
  modified_base 17: mod_base = OTHER; note = 2'-O-methyladenosine-3'-phosphate
  modified_base 18: mod_base = OTHER; note = 2'-O-methylcytidine-3'-phosphate
  modified_base 19: mod_base = OTHER; note = 2'-O-methylcytidine-3'-phosphorothioate
  modified_base 20: mod_base = OTHER; note = 2'-O-methylcytidine-3'-phosphorothioate
  modified_base 21: mod_base = OTHER; note = 2'-O-methyladenosine
ctgggccaccagtttcaccca

SEQ ID NO: 1999 - RNA, 21 nt, synthetic construct
  source 1..21: mol_type = other RNA
  modified_base 1: mod_base = OTHER; note = 2'-O-methylcytidine-3'-phosphorothioate
  modified_base 2: mod_base = OTHER; note = 2'-O-methyladenosine-3'-phosphorothioate
  modified_base 3: mod_base = OTHER; note = 2'-O-methylcytidine-3'-phosphate
  modified_base 4: mod_base = OTHER; note = 2'-O-methylcytidine-3'-phosphate
  modified_base 5: mod_base = OTHER; note = 2'-O-methyladenosine-3'-phosphate
  modified_base 6: mod_base = OTHER; note = 2'-O-hexadecyl-guanosine-3'-phosphate
  modified_base 7: mod_base = OTHER; note = 2'-deoxy-2'-fluorouridine-3'-phosphate
  modified_base 8: mod_base = OTHER; note = 2'-O-methyluridine-3'-phosphate
  modified_base 9: mod_base = OTHER; note = 2'-deoxy-2'-fluorouridine-3'-phosphate
  modified_base 10: mod_base = OTHER; note = 2'-deoxy-2'-fluorocytidine-3'-phosphate
  modified_base 11: mod_base = OTHER; note = 2'-deoxy-2'-fluoroadenosine-3'-phosphate
  modified_base 12: mod_base = OTHER; note = 2'-O-methylcytidine-3'-phosphate
  modified_base 13: mod_base = OTHER; note = 2'-O-methylcytidine-3'-phosphate
  modified_base 14: mod_base = OTHER; note = 2'-O-methylcytidine-3'-phosphate
  modified_base 15: mod_base = OTHER; note = 2'-O-methyluridine-3'-phosphate
  modified_base 16: mod_base = OTHER; note = 2'-O-methyluridine-3'-phosphate
  modified_base 17: mod_base = OTHER; note = 2'-O-methylguanosine-3'-phosphate
  modified_base 18: mod_base = OTHER; note = 2'-O-methylcytidine-3'-phosphate
  modified_base 19: mod_base = OTHER; note = 2'-O-methylcytidine-3'-phosphorothioate
  modified_base 20: mod_base = OTHER; note = 2'-O-methyladenosine-3'-phosphorothioate
  modified_base 21: mod_base = OTHER; note = 2'-O-methyladenosine
caccagtttcacccttgccaa

SEQ ID NO: 2000 - RNA, 21 nt, synthetic construct
  source 1..21: mol_type = other RNA
  modified_base 1: mod_base = OTHER; note = 2'-O-methyluridine-3'-phosphorothioate
  modified_base 2: mod_base = OTHER; note = 2'-O-methylcytidine-3'-phosphorothioate
  modified_base 3: mod_base = OTHER; note = 2'-O-methyladenosine-3'-phosphate
  modified_base 4: mod_base = OTHER; note = 2'-O-methylcytidine-3'-phosphate
  modified_base 5: mod_base = OTHER; note = 2'-O-methylcytidine-3'-phosphate
  modified_base 6: mod_base = OTHER; note = 2'-O-hexadecyl-cytidine-3'-phosphate
  modified_base 7: mod_base = OTHER; note = 2'-deoxy-2'-fluorouridine-3'-phosphate
  modified_base 8: mod_base = OTHER; note = 2'-O-methyluridine-3'-phosphate
  modified_base 9: mod_base = OTHER; note = 2'-deoxy-2'-fluoroguanosine-3'-phosphate
  modified_base 10: mod_base = OTHER; note = 2'-deoxy-2'-fluorocytidine-3'-phosphate
  modified_base 11: mod_base = OTHER; note = 2'-deoxy-2'-fluorocytidine-3'-phosphate
  modified_base 12: mod_base = OTHER; note = 2'-O-methyladenosine-3'-phosphate
  modified_base 13: mod_base = OTHER; note = 2'-O-methylcytidine-3'-phosphate
  modified_base 14: mod_base = OTHER; note = 2'-O-methylcytidine-3'-phosphate
  modified_base 15: mod_base = OTHER; note = 2'-O-methyluridine-3'-phosphate
  modified_base 16: mod_base = OTHER; note = 2'-O-methyluridine-3'-phosphate
  modified_base 17: mod_base = OTHER; note = 2'-O-methylguanosine-3'-phosphate
  modified_base 18: mod_base = OTHER; note = 2'-O-methylguanosine-3'-phosphate
  modified_base 19: mod_base = OTHER; note = 2'-O-methylcytidine-3'-phosphorothioate
  modified_base 20: mod_base = OTHER; note = 2'-O-methyluridine-3'-phosphorothioate
  modified_base 21: mod_base = OTHER; note = 2'-O-methyladenosine
tcacccttgccaccttggcta

SEQ ID NO: 2001 - RNA, 21 nt, synthetic construct
  source 1..21: mol_type = other RNA
  modified_base 1: mod_base = OTHER; note = 2'-O-methylguanosine-3'-phosphorothioate
  modified_base 2: mod_base = OTHER; note = 2'-O-methylcytidine-3'-phosphorothioate
  modified_base 3: mod_base = OTHER; note = 2'-O-methylcytidine-3'-phosphate
  modified_base 4: mod_base = OTHER; note = 2'-O-methyladenosine-3'-phosphate
  modified_base 5: mod_base = OTHER; note = 2'-O-methylcytidine-3'-phosphate
  modified_base 6: mod_base = OTHER; note = 2'-O-hexadecyl-cytidine-3'-phosphate
  modified_base 7: mod_base = OTHER; note = 2'-deoxy-2'-fluorouridine-3'-phosphate
  modified_base 8: mod_base = OTHER; note = 2'-O-methyluridine-3'-phosphate
  modified_base 9: mod_base = OTHER; note = 2'-deoxy-2'-fluoroguanosine-3'-phosphate
  modified_base 10: mod_base = OTHER; note = 2'-deoxy-2'-fluoroguanosine-3'-phosphate
  modified_base 11: mod_base = OTHER; note = 2'-deoxy-2'-fluorocytidine-3'-phosphate
  modified_base 12: mod_base = OTHER; note = 2'-O-methyluridine-3'-phosphate
  modified_base 13: mod_base = OTHER; note = 2'-O-methyladenosine-3'-phosphate
  modified_base 14: mod_base = OTHER; note = 2'-O-methylcytidine-3'-phosphate
  modified_base 15: mod_base = OTHER; note = 2'-O-methylcytidine-3'-phosphate
  modified_base 16: mod_base = OTHER; note = 2'-O-methyluridine-3'-phosphate
  modified_base 17: mod_base = OTHER; note = 2'-O-methyluridine-3'-phosphate
  modified_base 18: mod_base = OTHER; note = 2'-O-methylguanosine-3'-phosphate
  modified_base 19: mod_base = OTHER; note = 2'-O-methyladenosine-3'-phosphorothioate
  modified_base 20: mod_base = OTHER; note = 2'-O-methyladenosine-3'-phosphorothioate
  modified_base 21: mod_base = OTHER; note = 2'-O-methyladenosine
gccaccttggctaccttgaaa

SEQ ID NO: 2002 - RNA, 21 nt, synthetic construct
  source 1..21: mol_type = other RNA
  modified_base 1: mod_base = OTHER; note = 2'-O-methylcytidine-3'-phosphorothioate
  modified_base 2: mod_base = OTHER; note = 2'-O-methyluridine-3'-phosphorothioate
  modified_base 3: mod_base = OTHER; note = 2'-O-methyluridine-3'-phosphate
  modified_base 4: mod_base = OTHER; note = 2'-O-methylguanosine-3'-phosphate
  modified_base 5: mod_base = OTHER; note = 2'-O-methylguanosine-3'-phosphate
  modified_base 6: mod_base = OTHER; note = 2'-O-hexadecyl-cytidine-3'-phosphate
  modified_base 7: mod_base = OTHER; note = 2'-deoxy-2'-fluorouridine-3'-phosphate
  modified_base 8: mod_base = OTHER; note = 2'-O-methyladenosine-3'-phosphate
  modified_base 9: mod_base = OTHER; note = 2'-deoxy-2'-fluorocytidine-3'-phosphate
  modified_base 10: mod_base = OTHER; note = 2'-deoxy-2'-fluorocytidine-3'-phosphate
  modified_base 11: mod_base = OTHER; note = 2'-deoxy-2'-fluorouridine-3'-phosphate
  modified_base 12: mod_base = OTHER; note = 2'-O-methyluridine-3'-phosphate
  modified_base 13: mod_base = OTHER; note = 2'-O-methylguanosine-3'-phosphate
  modified_base 14: mod_base = OTHER; note = 2'-O-methyladenosine-3'-phosphate
  modified_base 15: mod_base = OTHER; note = 2'-O-methyladenosine-3'-phosphate
  modified_base 16: mod_base = OTHER; note = 2'-O-methyladenosine-3'-phosphate
  modified_base 17: mod_base = OTHER; note = 2'-O-methyladenosine-3'-phosphate
  modified_base 18: mod_base = OTHER; note = 2'-O-methylcytidine-3'-phosphate
  modified_base 19: mod_base = OTHER; note = 2'-O-methylcytidine-3'-phosphorothioate
  modified_base 20: mod_base = OTHER; note = 2'-O-methyladenosine-3'-phosphorothioate
  modified_base 21: mod_base = OTHER; note = 2'-O-methyladenosine
cttggctaccttgaaaaccaa

SEQ ID NO: 2003 - RNA, 21 nt, synthetic construct
  source 1..21: mol_type = other RNA
  modified_base 1: mod_base = OTHER; note = 2'-O-methyluridine-3'-phosphorothioate
  modified_base 2: mod_base = OTHER; note = 2'-O-methyladenosine-3'-phosphorothioate
  modified_base 3: mod_base = OTHER; note = 2'-O-methylcytidine-3'-phosphate
  modified_base 4: mod_base = OTHER; note = 2'-O-methylcytidine-3'-phosphate
  modified_base 5: mod_base = OTHER; note = 2'-O-methyluridine-3'-phosphate
  modified_base 6: mod_base = OTHER; note = 2'-O-hexadecyl-uridine-3'-phosphate
  modified_base 7: mod_base = OTHER; note = 2'-deoxy-2'-fluoroguanosine-3'-phosphate
  modified_base 8: mod_base = OTHER; note = 2'-O-methyladenosine-3'-phosphate
  modified_base 9: mod_base = OTHER; note = 2'-deoxy-2'-fluoroadenosine-3'-phosphate
  modified_base 10: mod_base = OTHER; note = 2'-deoxy-2'-fluoroadenosine-3'-phosphate
  modified_base 11: mod_base = OTHER; note = 2'-deoxy-2'-fluoroadenosine-3'-phosphate
  modified_base 12: mod_base = OTHER; note = 2'-O-methylcytidine-3'-phosphate
  modified_base 13: mod_base = OTHER; note = 2'-O-methylcytidine-3'-phosphate
  modified_base 14: mod_base = OTHER; note = 2'-O-methyladenosine-3'-phosphate
  modified_base 15: mod_base = OTHER; note = 2'-O-methylguanosine-3'-phosphate
  modified_base 16: mod_base = OTHER; note = 2'-O-methylcytidine-3'-phosphate
  modified_base 17: mod_base = OTHER; note = 2'-O-methyladenosine-3'-phosphate
  modified_base 18: mod_base = OTHER; note = 2'-O-methyladenosine-3'-phosphate
  modified_base 19: mod_base = OTHER; note = 2'-O-methylguanosine-3'-phosphorothioate
  modified_base 20: mod_base = OTHER; note = 2'-O-methyluridine-3'-phosphorothioate
  modified_base 21: mod_base = OTHER; note = 2'-O-methyladenosine
taccttgaaaaccagcaagta

SEQ ID NO: 2004 - RNA, 21 nt, synthetic construct
  source 1..21: mol_type = other RNA
  modified_base 1: mod_base = OTHER; note = 2'-O-methyladenosine-3'-phosphorothioate
  modified_base 2: mod_base = OTHER; note = 2'-O-methyladenosine-3'-phosphorothioate
  modified_base 3: mod_base = OTHER; note = 2'-O-methylcytidine-3'-phosphate
  modified_base 4: mod_base = OTHER; note = 2'-O-methylcytidine-3'-phosphate
  modified_base 5: mod_base = OTHER; note = 2'-O-methyladenosine-3'-phosphate
  modified_base 6: mod_base = OTHER; note = 2'-O-hexadecyl-guanosine-3'-phosphate
  modified_base 7: mod_base = OTHER; note = 2'-deoxy-2'-fluorocytidine-3'-phosphate
  modified_base 8: mod_base = OTHER; note = 2'-O-methyladenosine-3'-phosphate
  modified_base 9: mod_base = OTHER; note = 2'-deoxy-2'-fluoroadenosine-3'-phosphate
  modified_base 10: mod_base = OTHER; note = 2'-deoxy-2'-fluoroguanosine-3'-phosphate
  modified_base 11: mod_base = OTHER; note = 2'-deoxy-2'-fluorouridine-3'-phosphate
  modified_base 12: mod_base = OTHER; note = 2'-O-methylcytidine-3'-phosphate
  modified_base 13: mod_base = OTHER; note = 2'-O-methylcytidine-3'-phosphate
  modified_base 14: mod_base = OTHER; note = 2'-O-methylcytidine-3'-phosphate
  modified_base 15: mod_base = OTHER; note = 2'-O-methyladenosine-3'-phosphate
  modified_base 16: mod_base = OTHER; note = 2'-O-methylcytidine-3'-phosphate
  modified_base 17: mod_base = OTHER; note = 2'-O-methylcytidine-3'-phosphate
  modified_base 18: mod_base = OTHER; note = 2'-O-methyluridine-3'-phosphate
  modified_base 19: mod_base = OTHER; note = 2'-O-methylcytidine-3'-phosphorothioate
  modified_base 20: mod_base = OTHER; note = 2'-O-methyluridine-3'-phosphorothioate
  modified_base 21: mod_base = OTHER; note = 2'-O-methyladenosine
aaccagcaagtcccacctcta

SEQ ID NO: 2005 - RNA, 21 nt, synthetic construct
  source 1..21: mol_type = other RNA
  modified_base 1: mod_base = OTHER; note = 2'-O-methyladenosine-3'-phosphorothioate
  modified_base 2: mod_base = OTHER; note = 2'-O-methyladenosine-3'-phosphorothioate
  modified_base 3: mod_base = OTHER; note = 2'-O-methylguanosine-3'-phosphate
  modified_base 4: mod_base = OTHER; note = 2'-O-methyluridine-3'-phosphate
  modified_base 5: mod_base = OTHER; note = 2'-O-methylcytidine-3'-phosphate
  modified_base 6: mod_base = OTHER; note = 2'-O-hexadecyl-cytidine-3'-phosphate
  modified_base 7: mod_base = OTHER; note = 2'-deoxy-2'-fluorocytidine-3'-phosphate
  modified_base 8: mod_base = OTHER; note = 2'-O-methyladenosine-3'-phosphate
  modified_base 9: mod_base = OTHER; note = 2'-deoxy-2'-fluorocytidine-3'-phosphate
  modified_base 10: mod_base = OTHER; note = 2'-deoxy-2'-fluorocytidine-3'-phosphate
  modified_base 11: mod_base = OTHER; note = 2'-deoxy-2'-fluorouridine-3'-phosphate
  modified_base 12: mod_base = OTHER; note = 2'-O-methylcytidine-3'-phosphate
  modified_base 13: mod_base = OTHER; note = 2'-O-methyluridine-3'-phosphate
  modified_base 14: mod_base = OTHER; note = 2'-O-methylguanosine-3'-phosphate
  modified_base 15: mod_base = OTHER; note = 2'-O-methyluridine-3'-phosphate
  modified_base 16: mod_base = OTHER; note = 2'-O-methylcytidine-3'-phosphate
  modified_base 17: mod_base = OTHER; note = 2'-O-methyluridine-3'-phosphate
  modified_base 18: mod_base = OTHER; note = 2'-O-methyluridine-3'-phosphate
  modified_base 19: mod_base = OTHER; note = 2'-O-methylcytidine-3'-phosphorothioate
  modified_base 20: mod_base = OTHER; note = 2'-O-methylcytidine-3'-phosphorothioate
  modified_base 21: mod_base = OTHER; note = 2'-O-methyladenosine
aagtcccacctctgtcttcca

SEQ ID NO: 2006 - RNA, 21 nt, synthetic construct
  source 1..21: mol_type = other RNA
  modified_base 1: mod_base = OTHER; note = 2'-O-methylcytidine-3'-phosphorothioate
  modified_base 2: mod_base = OTHER; note = 2'-O-methyladenosine-3'-phosphorothioate
  modified_base 3: mod_base = OTHER; note = 2'-O-methylcytidine-3'-phosphate
  modified_base 4: mod_base = OTHER; note = 2'-O-methylcytidine-3'-phosphate
  modified_base 5: mod_base = OTHER; note = 2'-O-methyluridine-3'-phosphate
  modified_base 6: mod_base = OTHER; note = 2'-O-hexadecyl-cytidine-3'-phosphate
  modified_base 7: mod_base = OTHER; note = 2'-deoxy-2'-fluorouridine-3'-phosphate
  modified_base 8: mod_base = OTHER; note = 2'-O-methylguanosine-3'-phosphate
  modified_base 9: mod_base = OTHER; note = 2'-deoxy-2'-fluorouridine-3'-phosphate
  modified_base 10: mod_base = OTHER; note = 2'-deoxy-2'-fluorocytidine-3'-phosphate
  modified_base 11: mod_base = OTHER; note = 2'-deoxy-2'-fluorouridine-3'-phosphate
  modified_base 12: mod_base = OTHER; note = 2'-O-methyluridine-3'-phosphate
  modified_base 13: mod_base = OTHER; note = 2'-O-methylcytidine-3'-phosphate
  modified_base 14: mod_base = OTHER; note = 2'-O-methylcytidine-3'-phosphate
  modified_base 15: mod_base = OTHER; note = 2'-O-methylcytidine-3'-phosphate
  modified_base 16: mod_base = OTHER; note = 2'-O-methyladenosine-3'-phosphate
  modified_base 17: mod_base = OTHER; note = 2'-O-methyluridine-3'-phosphate
  modified_base 18: mod_base = OTHER; note = 2'-O-methylguanosine-3'-phosphate
  modified_base 19: mod_base = OTHER; note = 2'-O-methyluridine-3'-phosphorothioate
  modified_base 20: mod_base = OTHER; note = 2'-O-methylcytidine-3'-phosphorothioate
  modified_base 21: mod_base = OTHER; note = 2'-O-methyladenosine
cacctctgtcttcccatgtca

SEQ ID NO: 2007 - RNA, 21 nt, synthetic construct
  source 1..21: mol_type = other RNA
  modified_base 1: mod_base = OTHER; note = 2'-O-methylcytidine-3'-phosphorothioate
  modified_base 2: mod_base = OTHER; note = 2'-O-methyluridine-3'-phosphorothioate
  modified_base 3: mod_base = OTHER; note = 2'-O-methylguanosine-3'-phosphate
  modified_base 4: mod_base = OTHER; note = 2'-O-methyluridine-3'-phosphate
  modified_base 5: mod_base = OTHER; note = 2'-O-methylcytidine-3'-phosphate
  modified_base 6: mod_base = OTHER; note = 2'-O-hexadecyl-uridine-3'-phosphate
  modified_base 7: mod_base = OTHER; note = 2'-deoxy-2'-fluorouridine-3'-phosphate
  modified_base 8: mod_base = OTHER; note = 2'-O-methylcytidine-3'-phosphate
  modified_base 9: mod_base = OTHER; note = 2'-deoxy-2'-fluorocytidine-3'-phosphate
  modified_base 10: mod_base = OTHER; note = 2'-deoxy-2'-fluorocytidine-3'-phosphate
  modified_base 11: mod_base = OTHER; note = 2'-deoxy-2'-fluoroadenosine-3'-phosphate
  modified_base 12: mod_base = OTHER; note = 2'-O-methyluridine-3'-phosphate
  modified_base 13: mod_base = OTHER; note = 2'-O-methylguanosine-3'-phosphate
  modified_base 14: mod_base = OTHER; note = 2'-O-methyluridine-3'-phosphate
  modified_base 15: mod_base = OTHER; note = 2'-O-methylcytidine-3'-phosphate
  modified_base 16: mod_base = OTHER; note = 2'-O-methylcytidine-3'-phosphate
  modified_base 17: mod_base = OTHER; note = 2'-O-methyladenosine-3'-phosphate
  modified_base 18: mod_base = OTHER; note = 2'-O-methylguanosine-3'-phosphate
  modified_base 19: mod_base = OTHER; note = 2'-O-methyluridine-3'-phosphorothioate
  modified_base 20: mod_base = OTHER; note = 2'-O-methylcytidine-3'-phosphorothioate
  modified_base 21: mod_base = OTHER; note = 2'-O-methyladenosine
ctgtcttcccatgtccagtca

SEQ ID NO: 2008 - RNA, 21 nt, synthetic construct
  source 1..21: mol_type = other RNA
  modified_base 1: mod_base = OTHER; note = 2'-O-methyluridine-3'-phosphorothioate
  modified_base 2: mod_base = OTHER; note = 2'-O-methyluridine-3'-phosphorothioate
  modified_base 3: mod_base = OTHER; note = 2'-O-methylcytidine-3'-phosphate
  modified_base 4: mod_base = OTHER; note = 2'-O-methylcytidine-3'-phosphate
  modified_base 5: mod_base = OTHER; note = 2'-O-methylcytidine-3'-phosphate
  modified_base 6: mod_base = OTHER; note = 2'-O-hexadecyl-adenosine-3'-phosphate
  modified_base 7: mod_base = OTHER; note = 2'-deoxy-2'-fluorouridine-3'-phosphate
  modified_base 8: mod_base = OTHER; note = 2'-O-methylguanosine-3'-phosphate
  modified_base 9: mod_base = OTHER; note = 2'-deoxy-2'-fluorouridine-3'-phosphate
  modified_base 10: mod_base = OTHER; note = 2'-deoxy-2'-fluorocytidine-3'-phosphate
  modified_base 11: mod_base = OTHER; note = 2'-deoxy-2'-fluorocytidine-3'-phosphate
  modified_base 12: mod_base = OTHER; note = 2'-O-methyladenosine-3'-phosphate
  modified_base 13: mod_base = OTHER; note = 2'-O-methylguanosine-3'-phosphate
  modified_base 14: mod_base = OTHER; note = 2'-O-methyluridine-3'-phosphate
  modified_base 15: mod_base = OTHER; note = 2'-O-methylcytidine-3'-phosphate
  modified_base 16: mod_base = OTHER; note = 2'-O-methyluridine-3'-phosphate
  modified_base 17: mod_base = OTHER; note = 2'-O-methylguanosine-3'-phosphate
  modified_base 18: mod_base = OTHER; note = 2'-O-methyladenosine-3'-phosphate
  modified_base 19: mod_base = OTHER; note = 2'-O-methyluridine-3'-phosphorothioate
  modified_base 20: mod_base = OTHER; note = 2'-O-methyluridine-3'-phosphorothioate
  modified_base 21: mod_base = OTHER; note = 2'-O-methyladenosine
ttcccatgtccagtctgatta

SEQ ID NO: 2009 - RNA, 21 nt, synthetic construct
  source 1..21: mol_type = other RNA
  modified_base 1: mod_base = OTHER; note = 2'-O-methylcytidine-3'-phosphorothioate
  modified_base 2: mod_base = OTHER; note = 2'-O-methylcytidine-3'-phosphorothioate
  modified_base 3: mod_base = OTHER; note = 2'-O-methyladenosine-3'-phosphate
  modified_base 4: mod_base = OTHER; note = 2'-O-methylguanosine-3'-phosphate
  modified_base 5: mod_base = OTHER; note = 2'-O-methyluridine-3'-phosphate
  modified_base 6: mod_base = OTHER; note = 2'-O-hexadecyl-cytidine-3'-phosphate
  modified_base 7: mod_base = OTHER; note = 2'-deoxy-2'-fluorouridine-3'-phosphate
  modified_base 8: mod_base = OTHER; note = 2'-O-methylguanosine-3'-phosphate
  modified_base 9: mod_base = OTHER; note = 2'-deoxy-2'-fluoroadenosine-3'-phosphate
  modified_base 10: mod_base = OTHER; note = 2'-deoxy-2'-fluorouridine-3'-phosphate
  modified_base 11: mod_base = OTHER; note = 2'-deoxy-2'-fluorouridine-3'-phosphate
  modified_base 12: mod_base = OTHER; note = 2'-O-methylguanosine-3'-phosphate
  modified_base 13: mod_base = OTHER; note = 2'-O-methylcytidine-3'-phosphate
  modified_base 14: mod_base = OTHER; note = 2'-O-methyluridine-3'-phosphate
  modified_base 15: mod_base = OTHER; note = 2'-O-methylguanosine-3'-phosphate
  modified_base 16: mod_base = OTHER; note = 2'-O-methylguanosine-3'-phosphate
  modified_base 17: mod_base = OTHER; note = 2'-O-methyladenosine-3'-phosphate
  modified_base 18: mod_base = OTHER; note = 2'-O-methyladenosine-3'-phosphate
  modified_base 19: mod_base = OTHER; note = 2'-O-methyladenosine-3'-phosphorothioate
  modified_base 20: mod_base = OTHER; note = 2'-O-methyladenosine-3'-phosphorothioate
  modified_base 21: mod_base = OTHER; note = 2'-O-methyladenosine
ccagtctgattgctggaaaaa

SEQ ID NO: 2010 - RNA, 21 nt, synthetic construct
  source 1..21: mol_type = other RNA
  modified_base 1: mod_base = OTHER; note = 2'-O-methyluridine-3'-phosphorothioate
  modified_base 2: mod_base = OTHER; note = 2'-O-methylguanosine-3'-phosphorothioate
  modified_base 3: mod_base = OTHER; note = 2'-O-methyladenosine-3'-phosphate
  modified_base 4: mod_base = OTHER; note = 2'-O-methyluridine-3'-phosphate
  modified_base 5: mod_base = OTHER; note = 2'-O-methyluridine-3'-phosphate
  modified_base 6: mod_base = OTHER; note = 2'-O-hexadecyl-guanosine-3'-phosphate
  modified_base 7: mod_base = OTHER; note = 2'-deoxy-2'-fluorocytidine-3'-phosphate
  modified_base 8: mod_base = OTHER; note = 2'-O-methyluridine-3'-phosphate
  modified_base 9: mod_base = OTHER; note = 2'-deoxy-2'-fluoroguanosine-3'-phosphate
  modified_base 10: mod_base = OTHER; note = 2'-deoxy-2'-fluoroguanosine-3'-phosphate
  modified_base 11: mod_base = OTHER; note = 2'-deoxy-2'-fluoroadenosine-3'-phosphate
  modified_base 12: mod_base = OTHER; note = 2'-O-methyladenosine-3'-phosphate
  modified_base 13: mod_base = OTHER; note = 2'-O-methyladenosine-3'-phosphate
  modified_base 14: mod_base = OTHER; note = 2'-O-methyladenosine-3'-phosphate
  modified_base 15: mod_base = OTHER; note = 2'-O-methylguanosine-3'-phosphate
  modified_base 16: mod_base = OTHER; note = 2'-O-methylguanosine-3'-phosphate
  modified_base 17: mod_base = OTHER; note = 2'-O-methylguanosine-3'-phosphate
  modified_base 18: mod_base = OTHER; note = 2'-O-methyladenosine-3'-phosphate
  modified_base 19: mod_base = OTHER; note = 2'-O-methyladenosine-3'-phosphorothioate
  modified_base 20: mod_base = OTHER; note = 2'-O-methyladenosine-3'-phosphorothioate
  modified_base 21: mod_base = OTHER; note = 2'-O-methyladenosine
tgattgctggaaaagggaaaa

SEQ ID NO: 2011 - RNA, 21 nt, synthetic construct
  source 1..21: mol_type = other RNA
  modified_base 1: mod_base = OTHER; note = 2'-O-methylcytidine-3'-phosphorothioate
  modified_base 2: mod_base = OTHER; note = 2'-O-methyluridine-3'-phosphorothioate
  modified_base 3: mod_base = OTHER; note = 2'-O-methylguanosine-3'-phosphate
  modified_base 4: mod_base = OTHER; note = 2'-O-methylguanosine-3'-phosphate
  modified_base 5: mod_base = OTHER; note = 2'-O-methyladenosine-3'-phosphate
  modified_base 6: mod_base = OTHER; note = 2'-O-hexadecyl-adenosine-3'-phosphate
  modified_base 7: mod_base = OTHER; note = 2'-deoxy-2'-fluoroadenosine-3'-phosphate
  modified_base 8: mod_base = OTHER; note = 2'-O-methyladenosine-3'-phosphate
  modified_base 9: mod_base = OTHER; note = 2'-deoxy-2'-fluoroguanosine-3'-phosphate
  modified_base 10: mod_base = OTHER; note = 2'-deoxy-2'-fluoroguanosine-3'-phosphate
  modified_base 11: mod_base = OTHER; note = 2'-deoxy-2'-fluoroguanosine-3'-phosphate
  modified_base 12: mod_base = OTHER; note = 2'-O-methyladenosine-3'-phosphate
  modified_base 13: mod_base = OTHER; note = 2'-O-methyladenosine-3'-phosphate
  modified_base 14: mod_base = OTHER; note = 2'-O-methyladenosine-3'-phosphate
  modified_base 15: mod_base = OTHER; note = 2'-O-methylguanosine-3'-phosphate
  modified_base 16: mod_base = OTHER; note = 2'-O-methylcytidine-3'-phosphate
  modified_base 17: mod_base = OTHER; note = 2'-O-methylcytidine-3'-phosphate
  modified_base 18: mod_base = OTHER; note = 2'-O-methyladenosine-3'-phosphate
  modified_base 19: mod_base = OTHER; note = 2'-O-methyluridine-3'-phosphorothioate
  modified_base 20: mod_base = OTHER; note = 2'-O-methyluridine-3'-phosphorothioate
  modified_base 21: mod_base = OTHER; note = 2'-O-methyladenosine
ctggaaaagggaaagccatta

SEQ ID NO: 2012 - RNA, 21 nt, synthetic construct
  source 1..21: mol_type = other RNA
  modified_base 1: mod_base = OTHER; note = 2'-O-methyladenosine-3'-phosphorothioate
  modified_base 2: mod_base = OTHER; note = 2'-O-methyladenosine-3'-phosphorothioate
  modified_base 3: mod_base = OTHER; note = 2'-O-methylguanosine-3'-phosphate
  modified_base 4: mod_base = OTHER; note = 2'-O-methylguanosine-3'-phosphate
  modified_base 5: mod_base = OTHER; note = 2'-O-methylguanosine-3'-phosphate
  modified_base 6: mod_base = OTHER; note = 2'-O-hexadecyl-adenosine-3'-phosphate
  modified_base 7: mod_base = OTHER; note = 2'-deoxy-2'-fluoroadenosine-3'-phosphate
  modified_base 8: mod_base = OTHER; note = 2'-O-methyladenosine-3'-phosphate
  modified_base 9: mod_base = OTHER; note = 2'-deoxy-2'-fluoroguanosine-3'-phosphate
  modified_base 10: mod_base = OTHER; note = 2'-deoxy-2'-fluorocytidine-3'-phosphate
  modified_base 11: mod_base = OTHER; note = 2'-deoxy-2'-fluorocytidine-3'-phosphate
  modified_base 12: mod_base = OTHER; note = 2'-O-methyladenosine-3'-phosphate
  modified_base 13: mod_base = OTHER; note = 2'-O-methyluridine-3'-phosphate
  modified_base 14: mod_base = OTHER; note = 2'-O-methyluridine-3'-phosphate
  modified_base 15: mod_base = OTHER; note = 2'-O-methyluridine-3'-phosphate
  modified_base 16: mod_base = OTHER; note = 2'-O-methyluridine-3'-phosphate
  modified_base 17: mod_base = OTHER; note = 2'-O-methylguanosine-3'-phosphate
  modified_base 18: mod_base = OTHER; note = 2'-O-methyluridine-3'-phosphate
  modified_base 19: mod_base = OTHER; note = 2'-O-methylcytidine-3'-phosphorothioate
  modified_base 20: mod_base = OTHER; note = 2'-O-methyluridine-3'-phosphorothioate
  modified_base 21: mod_base = OTHER; note = 2'-O-methyladenosine
aagggaaagccattttgtcta

SEQ ID NO: 2013 - RNA, 21 nt, synthetic construct
  source 1..21: mol_type = other RNA
  modified_base 1: mod_base = OTHER; note = 2'-O-methyladenosine-3'-phosphorothioate
  modified_base 2: mod_base = OTHER; note = 2'-O-methylguanosine-3'-phosphorothioate
  modified_base 3: mod_base = OTHER; note = 2'-O-methylcytidine-3'-phosphate
  modified_base 4: mod_base = OTHER; note = 2'-O-methylcytidine-3'-phosphate
  modified_base 5: mod_base = OTHER; note = 2'-O-methyladenosine-3'-phosphate
  modified_base 6: mod_base = OTHER; note = 2'-O-hexadecyl-uridine-3'-phosphate
  modified_base 7: mod_base = OTHER; note = 2'-deoxy-2'-fluorouridine-3'-phosphate
  modified_base 8: mod_base = OTHER; note = 2'-O-methyluridine-3'-phosphate
  modified_base 9: mod_base = OTHER; note = 2'-deoxy-2'-fluorouridine-3'-phosphate
  modified_base 10: mod_base = OTHER; note = 2'-deoxy-2'-fluoroguanosine-3'-phosphate
  modified_base 11: mod_base = OTHER; note = 2'-deoxy-2'-fluorouridine-3'-phosphate
  modified_base 12: mod_base = OTHER; note = 2'-O-methylcytidine-3'-phosphate
  modified_base 13: mod_base = OTHER; note = 2'-O-methyluridine-3'-phosphate
  modified_base 14: mod_base = OTHER; note = 2'-O-methylcytidine-3'-phosphate
  modified_base 15: mod_base = OTHER; note = 2'-O-methyluridine-3'-phosphate
  modified_base 16: mod_base = OTHER; note = 2'-O-methylcytidine-3'-phosphate
  modified_base 17: mod_base = OTHER; note = 2'-O-methyluridine-3'-phosphate
  modified_base 18: mod_base = OTHER; note = 2'-O-methyladenosine-3'-phosphate
  modified_base 19: mod_base = OTHER; note = 2'-O-methyluridine-3'-phosphorothioate
  modified_base 20: mod_base = OTHER; note = 2'-O-methylguanosine-3'-phosphorothioate
  modified_base 21: mod_base = OTHER; note = 2'-O-methyladenosine
agccattttgtctctctatga

SEQ ID NO: 2014 - RNA, 21 nt, synthetic construct
  source 1..21: mol_type = other RNA
  modified_base 1: mod_base = OTHER; note = 2'-O-methyluridine-3'-phosphorothioate
  modified_base 2: mod_base = OTHER; note = 2'-O-methyluridine-3'-phosphorothioate
  modified_base 3: mod_base = OTHER; note = 2'-O-methyluridine-3'-phosphate
  modified_base 4: mod_base = OTHER; note = 2'-O-methyluridine-3'-phosphate
  modified_base 5: mod_base = OTHER; note = 2'-O-methylguanosine-3'-phosphate
  modified_base 6: mod_base = OTHER; note = 2'-O-hexadecyl-uridine-3'-phosphate
  modified_base 7: mod_base = OTHER; note = 2'-deoxy-2'-fluorocytidine-3'-phosphate
  modified_base 8: mod_base = OTHER; note = 2'-O-methyluridine-3'-phosphate
  modified_base 9: mod_base = OTHER; note = 2'-deoxy-2'-fluorocytidine-3'-phosphate
  modified_base 10: mod_base = OTHER; note = 2'-deoxy-2'-fluorouridine-3'-phosphate
  modified_base 11: mod_base = OTHER; note = 2'-deoxy-2'-fluorocytidine-3'-phosphate
  modified_base 12: mod_base = OTHER; note = 2'-O-methyluridine-3'-phosphate
  modified_base 13: mod_base = OTHER; note = 2'-O-methyladenosine-3'-phosphate
  modified_base 14: mod_base = OTHER; note = 2'-O-methyluridine-3'-phosphate
  modified_base 15: mod_base = OTHER; note = 2'-O-methylguanosine-3'-phosphate
  modified_base 16: mod_base = OTHER; note = 2'-O-methyluridine-3'-phosphate
  modified_base 17: mod_base = OTHER; note = 2'-O-methylguanosine-3'-phosphate
  modified_base 18: mod_base = OTHER; note = 2'-O-methylguanosine-3'-phosphate
  modified_base 19: mod_base = OTHER; note = 2'-O-methyluridine-3'-phosphorothioate
  modified_base 20: mod_base = OTHER; note = 2'-O-methylcytidine-3'-phosphorothioate
  modified_base 21: mod_base = OTHER; note = 2'-O-methyladenosine
ttttgtctctctatgtggtca

SEQ ID NO: 2015 - RNA, 21 nt, synthetic construct
  source 1..21: mol_type = other RNA
  modified_base 1: mod_base = OTHER; note = 2'-O-methyluridine-3'-phosphorothioate
  modified_base 2: mod_base = OTHER; note = 2'-O-methylcytidine-3'-phosphorothioate
  modified_base 3: mod_base = OTHER; note = 2'-O-methyluridine-3'-phosphate
  modified_base 4: mod_base = OTHER; note = 2'-O-methylcytidine-3'-phosphate
  modified_base 5: mod_base = OTHER; note = 2'-O-methyluridine-3'-phosphate
  modified_base 6: mod_base = OTHER; note = 2'-O-hexadecyl-cytidine-3'-phosphate
  modified_base 7: mod_base = OTHER; note = 2'-deoxy-2'-fluorouridine-3'-phosphate
  modified_base 8: mod_base = OTHER; note = 2'-O-methyladenosine-3'-phosphate
  modified_base 9: mod_base = OTHER; note = 2'-deoxy-2'-fluorouridine-3'-phosphate
  modified_base 10: mod_base = OTHER; note = 2'-deoxy-2'-fluoroguanosine-3'-phosphate
  modified_base 11: mod_base = OTHER; note = 2'-deoxy-2'-fluorouridine-3'-phosphate
  modified_base 12: mod_base = OTHER; note = 2'-O-methylguanosine-3'-phosphate
  modified_base 13: mod_base = OTHER; note = 2'-O-methylguanosine-3'-phosphate
  modified_base 14: mod_base = OTHER; note = 2'-O-methyluridine-3'-phosphate
  modified_base 15: mod_base = OTHER; note = 2'-O-methylcytidine-3'-phosphate
  modified_base 16: mod_base = OTHER; note = 2'-O-methylguanosine-3'-phosphate
  modified_base 17: mod_base = OTHER; note = 2'-O-methyladenosine-3'-phosphate
  modified_base 18: mod_base = OTHER; note = 2'-O-methylcytidine-3'-phosphate
  modified_base 19: mod_base = OTHER; note = 2'-O-methyluridine-3'-phosphorothioate
  modified_base 20: mod_base = OTHER; note = 2'-O-methyluridine-3'-phosphorothioate
  modified_base 21: mod_base = OTHER; note = 2'-O-methyladenosine
tctctctatgtggtcgactta

SEQ ID NO: 2016 - RNA, 21 nt, synthetic construct
  source 1..21: mol_type = other RNA
  modified_base 1: mod_base = OTHER; note = 2'-O-methyluridine-3'-phosphorothioate
  modified_base 2: mod_base = OTHER; note = 2'-O-methylguanosine-3'-phosphorothioate
  modified_base 3: mod_base = OTHER; note = 2'-O-methyluridine-3'-phosphate
  modified_base 4: mod_base = OTHER; note = 2'-O-methylguanosine-3'-phosphate
  modified_base 5: mod_base = OTHER; note = 2'-O-methylguanosine-3'-phosphate
  modified_base 6: mod_base = OTHER; note = 2'-O-hexadecyl-uridine-3'-phosphate
  modified_base 7: mod_base = OTHER; note = 2'-deoxy-2'-fluorocytidine-3'-phosphate
  modified_base 8: mod_base = OTHER; note = 2'-O-methylguanosine-3'-phosphate
  modified_base 9: mod_base = OTHER; note = 2'-deoxy-2'-fluoroadenosine-3'-phosphate
  modified_base 10: mod_base = OTHER; note = 2'-deoxy-2'-fluorocytidine-3'-phosphate
  modified_base 11: mod_base = OTHER; note = 2'-deoxy-2'-fluorouridine-3'-phosphate
  modified_base 12: mod_base = OTHER; note = 2'-O-methyluridine-3'-phosphate
  modified_base 13: mod_base = OTHER; note = 2'-O-methylcytidine-3'-phosphate
  modified_base 14: mod_base = OTHER; note = 2'-O-methyladenosine-3'-phosphate
  modified_base 15: mod_base = OTHER; note = 2'-O-methylcytidine-3'-phosphate
  modified_base 16: mod_base = OTHER; note = 2'-O-methylcytidine-3'-phosphate
  modified_base 17: mod_base = OTHER; note = 2'-O-methyluridine-3'-phosphate
  modified_base 18: mod_base = OTHER; note = 2'-O-methyluridine-3'-phosphate
  modified_base 19: mod_base = OTHER; note = 2'-O-methylcytidine-3'-phosphorothioate
  modified_base 20: mod_base = OTHER; note = 2'-O-methyluridine-3'-phosphorothioate
  modified_base 21: mod_base = OTHER; note = 2'-O-methyladenosine
tgtggtcgacttcaccttcta

SEQ ID NO: 2017 - RNA, 21 nt, synthetic construct
  source 1..21: mol_type = other RNA
  modified_base 1: mod_base = OTHER; note = 2'-O-methylcytidine-3'-phosphorothioate
  modified_base 2: mod_base = OTHER; note = 2'-O-methylguanosine-3'-phosphorothioate
  modified_base 3: mod_base = OTHER; note = 2'-O-methyladenosine-3'-phosphate
  modified_base 4: mod_base = OTHER; note = 2'-O-methylcytidine-3'-phosphate
  modified_base 5: mod_base = OTHER; note = 2'-O-methyluridine-3'-phosphate
  modified_base 6: mod_base = OTHER; note = 2'-O-hexadecyl-uridine-3'-phosphate
  modified_base 7: mod_base = OTHER; note = 2'-deoxy-2'-fluorocytidine-3'-phosphate
  modified_base 8: mod_base = OTHER; note = 2'-O-methyladenosine-3'-phosphate
  modified_base 9: mod_base = OTHER; note = 2'-deoxy-2'-fluorocytidine-3'-phosphate
  modified_base 10: mod_base = OTHER; note = 2'-deoxy-2'-fluorocytidine-3'-phosphate
  modified_base 11: mod_base = OTHER; note = 2'-deoxy-2'-fluorouridine-3'-phosphate
  modified_base 12: mod_base = OTHER; note = 2'-O-methyluridine-3'-phosphate
  modified_base 13: mod_base = OTHER; note = 2'-O-methylcytidine-3'-phosphate
  modified_base 14: mod_base = OTHER; note = 2'-O-methyluridine-3'-phosphate
  modified_base 15: mod_base = OTHER; note = 2'-O-methylguanosine-3'-phosphate
  modified_base 16: mod_base = OTHER; note = 2'-O-methyluridine-3'-phosphate
  modified_base 17: mod_base = OTHER; note = 2'-O-methylguanosine-3'-phosphate
  modified_base 18: mod_base = OTHER; note = 2'-O-methyluridine-3'-phosphate
  modified_base 19: mod_base = OTHER; note = 2'-O-methyluridine-3'-phosphorothioate
  modified_base 20: mod_base = OTHER; note = 2'-O-methylguanosine-3'-phosphorothioate
  modified_base 21: mod_base = OTHER; note = 2'-O-methyladenosine
cgacttcaccttctgtgttga

SEQ ID NO: 2018 - RNA, 21 nt, synthetic construct
  source 1..21: mol_type = other RNA
  modified_base 1: mod_base = OTHER; note = 2'-O-methyladenosine-3'-phosphorothioate
  modified_base 2: mod_base = OTHER; note = 2'-O-methylcytidine-3'-phosphorothioate
  modified_base 3: mod_base = OTHER; note = 2'-O-methylcytidine-3'-phosphate
  modified_base 4: mod_base = OTHER; note = 2'-O-methyluridine-3'-phosphate
  modified_base 5: mod_base = OTHER; note = 2'-O-methyluridine-3'-phosphate
  modified_base 6: mod_base = OTHER; note = 2'-O-hexadecyl-cytidine-3'-phosphate
  modified_base 7: mod_base = OTHER; note = 2'-deoxy-2'-fluorouridine-3'-phosphate
  modified_base 8: mod_base = OTHER; note = 2'-O-methylguanosine-3'-phosphate
  modified_base 9: mod_base = OTHER; note = 2'-deoxy-2'-fluorouridine-3'-phosphate
  modified_base 10: mod_base = OTHER; note = 2'-deoxy-2'-fluoroguanosine-3'-phosphate
  modified_base 11: mod_base = OTHER; note = 2'-deoxy-2'-fluorouridine-3'-phosphate
  modified_base 12: mod_base = OTHER; note = 2'-O-methyluridine-3'-phosphate
  modified_base 13: mod_base = OTHER; note = 2'-O-methylguanosine-3'-phosphate
  modified_base 14: mod_base = OTHER; note = 2'-O-methylcytidine-3'-phosphate
  modified_base 15: mod_base = OTHER; note = 2'-O-methyluridine-3'-phosphate
  modified_base 16: mod_base = OTHER; note = 2'-O-methylguanosine-3'-phosphate
  modified_base 17: mod_base = OTHER; note = 2'-O-methyluridine-3'-phosphate
  modified_base 18: mod_base = OTHER; note = 2'-O-methylguanosine-3'-phosphate
  modified_base 19: mod_base = OTHER; note = 2'-O-methylguanosine-3'-phosphorothioate
  modified_base 20: mod_base = OTHER; note = 2'-O-methyluridine-3'-phosphorothioate
  modified_base 21: mod_base = OTHER; note = 2'-O-methyladenosine
accttctgtgttgctgtggta

SEQ ID NO: 2019 - RNA, 21 nt, synthetic construct
  source 1..21: mol_type = other RNA
  modified_base 1: mod_base = OTHER; note = 2'-O-methyluridine-3'-phosphorothioate
  modified_base 2: mod_base = OTHER; note = 2'-O-methylguanosine-3'-phosphorothioate
  modified_base 3: mod_base = OTHER; note = 2'-O-methyluridine-3'-phosphate
  modified_base 4: mod_base = OTHER; note = 2'-O-methyluridine-3'-phosphate
  modified_base 5: mod_base = OTHER; note = 2'-O-methylguanosine-3'-phosphate
  modified_base 6: mod_base = OTHER; note = 2'-O-hexadecyl-cytidine-3'-phosphate
  modified_base 7: mod_base = OTHER; note = 2'-deoxy-2'-fluorouridine-3'-phosphate
  modified_base 8: mod_base = OTHER; note = 2'-O-methylguanosine-3'-phosphate
  modified_base 9: mod_base = OTHER; note = 2'-deoxy-2'-fluorouridine-3'-phosphate
  modified_base 10: mod_base = OTHER; note = 2'-deoxy-2'-fluoroguanosine-3'-phosphate
  modified_base 11: mod_base = OTHER; note = 2'-deoxy-2'-fluoroguanosine-3'-phosphate
  modified_base 12: mod_base = OTHER; note = 2'-O-methyluridine-3'-phosphate
  modified_base 13: mod_base = OTHER; note = 2'-O-methylcytidine-3'-phosphate
  modified_base 14: mod_base = OTHER; note = 2'-O-methyluridine-3'-phosphate
  modified_base 15: mod_base = OTHER; note = 2'-O-methylcytidine-3'-phosphate
  modified_base 16: mod_base = OTHER; note = 2'-O-methyluridine-3'-phosphate
  modified_base 17: mod_base = OTHER; note = 2'-O-methylguanosine-3'-phosphate
  modified_base 18: mod_base = OTHER; note = 2'-O-methyluridine-3'-phosphate
  modified_base 19: mod_base = OTHER; note = 2'-O-methylcytidine-3'-phosphorothioate
  modified_base 20: mod_base = OTHER; note = 2'-O-methyluridine-3'-phosphorothioate
  modified_base 21: mod_base = OTHER; note = 2'-O-methyladenosine
tgttgctgtggtctctgtcta

SEQ ID NO: 2020 - RNA, 21 nt, synthetic construct
  source 1..21: mol_type = other RNA
  modified_base 1: mod_base = OTHER; note = 2'-O-methyluridine-3'-phosphorothioate
  modified_base 2: mod_base = OTHER; note = 2'-O-methylguanosine-3'-phosphorothioate
  modified_base 3: mod_base = OTHER; note = 2'-O-methyluridine-3'-phosphate
  modified_base 4: mod_base = OTHER; note = 2'-O-methylguanosine-3'-phosphate
  modified_base 5: mod_base = OTHER; note = 2'-O-methylguanosine-3'-phosphate
  modified_base 6: mod_base = OTHER; note = 2'-O-hexadecyl-uridine-3'-phosphate
  modified_base 7: mod_base = OTHER; note = 2'-deoxy-2'-fluorocytidine-3'-phosphate
  modified_base 8: mod_base = OTHER; note = 2'-O-methyluridine-3'-phosphate
  modified_base 9: mod_base = OTHER; note = 2'-deoxy-2'-fluorocytidine-3'-phosphate
  modified_base 10: mod_base = OTHER; note = 2'-deoxy-2'-fluorouridine-3'-phosphate
  modified_base 11: mod_base = OTHER; note = 2'-deoxy-2'-fluoroguanosine-3'-phosphate
  modified_base 12: mod_base = OTHER; note = 2'-O-methyluridine-3'-phosphate
  modified_base 13: mod_base = OTHER; note = 2'-O-methylcytidine-3'-phosphate
  modified_base 14: mod_base = OTHER; note = 2'-O-methyluridine-3'-phosphate
  modified_base 15: mod_base = OTHER; note = 2'-O-methylcytidine-3'-phosphate
  modified_base 16: mod_base = OTHER; note = 2'-O-methyluridine-3'-phosphate
  modified_base 17: mod_base = OTHER; note = 2'-O-methyluridine-3'-phosphate
  modified_base 18: mod_base = OTHER; note = 2'-O-methyladenosine-3'-phosphate
  modified_base 19: mod_base = OTHER; note = 2'-O-methylcytidine-3'-phosphorothioate
  modified_base 20: mod_base = OTHER; note = 2'-O-methyladenosine-3'-phosphorothioate
  modified_base 21: mod_base = OTHER; note = 2'-O-methyladenosine
tgtggtctctgtctcttacaa

SEQ ID NO: 2021 - RNA, 21 nt, synthetic construct
  source 1..21: mol_type = other RNA
  modified_base 1: mod_base = OTHER; note = 2'-O-methyluridine-3'-phosphorothioate
  modified_base 2: mod_base = OTHER; note = 2'-O-methylcytidine-3'-phosphorothioate
  modified_base 3: mod_base = OTHER; note = 2'-O-methyluridine-3'-phosphate
  modified_base 4: mod_base = OTHER; note = 2'-O-methylcytidine-3'-phosphate
  modified_base 5: mod_base = OTHER; note = 2'-O-methyluridine-3'-phosphate
  modified_base 6: mod_base = OTHER; note = 2'-O-hexadecyl-guanosine-3'-phosphate
  modified_base 7: mod_base = OTHER; note = 2'-deoxy-2'-fluorouridine-3'-phosphate
  modified_base 8: mod_base = OTHER; note = 2'-O-methylcytidine-3'-phosphate
  modified_base 9: mod_base = OTHER; note = 2'-deoxy-2'-fluorouridine-3'-phosphate
  modified_base 10: mod_base = OTHER; note = 2'-deoxy-2'-fluorocytidine-3'-phosphate
  modified_base 11: mod_base = OTHER; note = 2'-deoxy-2'-fluorouridine-3'-phosphate
  modified_base 12: mod_base = OTHER; note = 2'-O-methyluridine-3'-phosphate
  modified_base 13: mod_base = OTHER; note = 2'-O-methyladenosine-3'-phosphate
  modified_base 14: mod_base = OTHER; note = 2'-O-methylcytidine-3'-phosphate
  modified_base 15: mod_base = OTHER; note = 2'-O-methyladenosine-3'-phosphate
  modified_base 16: mod_base = OTHER; note = 2'-O-methyluridine-3'-phosphate
  modified_base 17: mod_base = OTHER; note = 2'-O-methylcytidine-3'-phosphate
  modified_base 18: mod_base = OTHER; note = 2'-O-methyladenosine-3'-phosphate
  modified_base 19: mod_base = OTHER; note = 2'-O-methyluridine-3'-phosphorothioate
  modified_base 20: mod_base = OTHER; note = 2'-O-methylguanosine-3'-phosphorothioate
  modified_base 21: mod_base = OTHER; note = 2'-O-methyladenosine
tctctgtctcttacatcatga

SEQ ID NO: 2022 - RNA, 21 nt, synthetic construct
  source 1..21: mol_type = other RNA
  modified_base 1: mod_base = OTHER; note = 2'-O-methyluridine-3'-phosphorothioate
  modified_base 2: mod_base = OTHER; note = 2'-O-methylcytidine-3'-phosphorothioate
  modified_base 3: mod_base = OTHER; note = 2'-O-methyluridine-3'-phosphate
  modified_base 4: mod_base = OTHER; note = 2'-O-methyluridine-3'-phosphate
  modified_base 5: mod_base = OTHER; note = 2'-O-methyladenosine-3'-phosphate
  modified_base 6: mod_base = OTHER; note = 2'-O-hexadecyl-cytidine-3'-phosphate
  modified_base 7: mod_base = OTHER; note = 2'-deoxy-2'-fluoroadenosine-3'-phosphate
  modified_base 8: mod_base = OTHER; note = 2'-O-methyluridine-3'-phosphate
  modified_base 9: mod_base = OTHER; note = 2'-deoxy-2'-fluorocytidine-3'-phosphate
  modified_base 10: mod_base = OTHER; note = 2'-deoxy-2'-fluoroadenosine-3'-phosphate
  modified_base 11: mod_base = OTHER; note = 2'-deoxy-2'-fluorouridine-3'-phosphate
  modified_base 12: mod_base = OTHER; note = 2'-O-methylguanosine-3'-phosphate
  modified_base 13: mod_base = OTHER; note = 2'-O-methyladenosine-3'-phosphate
  modified_base 14: mod_base = OTHER; note = 2'-O-methyluridine-3'-phosphate
  modified_base 15: mod_base = OTHER; note = 2'-O-methyluridine-3'-phosphate
  modified_base 16: mod_base = OTHER; note = 2'-O-methylguanosine-3'-phosphate
  modified_base 17: mod_base = OTHER; note = 2'-O-methylcytidine-3'-phosphate
  modified_base 18: mod_base = OTHER; note = 2'-O-methyluridine-3'-phosphate
  modified_base 19: mod_base = OTHER; note = 2'-O-methylcytidine-3'-phosphorothioate
  modified_base 20: mod_base = OTHER; note = 2'-O-methyladenosine-3'-phosphorothioate
  modified_base 21: mod_base = OTHER; note = 2'-O-methyladenosine
tcttacatcatgattgctcaa

SEQ ID NO: 2023 - RNA, 21 nt, synthetic construct
  source 1..21: mol_type = other RNA
  modified_base 1: mod_base = OTHER; note = 2'-O-methyladenosine-3'-phosphorothioate
  modified_base 2: mod_base = OTHER; note = 2'-O-methyluridine-3'-phosphorothioate
  modified_base 3: mod_base = OTHER; note = 2'-O-methylcytidine-3'-phosphate
  modified_base 4: mod_base = OTHER; note = 2'-O-methyladenosine-3'-phosphate
  modified_base 5: mod_base = OTHER; note = 2'-O-methyluridine-3'-phosphate
  modified_base 6: mod_base = OTHER; note = 2'-O-hexadecyl-guanosine-3'-phosphate
  modified_base 7: mod_base = OTHER; note = 2'-deoxy-2'-fluoroadenosine-3'-phosphate
  modified_base 8: mod_base = OTHER; note = 2'-O-methyluridine-3'-phosphate
  modified_base 9: mod_base = OTHER; note = 2'-deoxy-2'-fluorouridine-3'-phosphate
  modified_base 10: mod_base = OTHER; note = 2'-deoxy-2'-fluoroguanosine-3'-phosphate
  modified_base 11: mod_base = OTHER; note = 2'-deoxy-2'-fluorocytidine-3'-phosphate
  modified_base 12: mod_base = OTHER; note = 2'-O-methyluridine-3'-phosphate
  modified_base 13: mod_base = OTHER; note = 2'-O-methylcytidine-3'-phosphate
  modified_base 14: mod_base = OTHER; note = 2'-O-methyladenosine-3'-phosphate
  modified_base 15: mod_base = OTHER; note = 2'-O-methylguanosine-3'-phosphate
  modified_base 16: mod_base = OTHER; note = 2'-O-methyladenosine-3'-phosphate
  modified_base 17: mod_base = OTHER; note = 2'-O-methylcytidine-3'-phosphate
  modified_base 18: mod_base = OTHER; note = 2'-O-methylcytidine-3'-phosphate
  modified_base 19: mod_base = OTHER; note = 2'-O-methylcytidine-3'-phosphorothioate
  modified_base 20: mod_base = OTHER; note = 2'-O-methyluridine-3'-phosphorothioate
  modified_base 21: mod_base = OTHER; note = 2'-O-methyladenosine
atcatgattgctcagacccta

SEQ ID NO: 2024 - RNA, 21 nt, synthetic construct
  source 1..21: mol_type = other RNA
  modified_base 1: mod_base = OTHER; note = 2'-O-methyladenosine-3'-phosphorothioate
  modified_base 2: mod_base = OTHER; note = 2'-O-methylguanosine-3'-phosphorothioate
  modified_base 3: mod_base = OTHER; note = 2'-O-methyladenosine-3'-phosphate
  modified_base 4: mod_base = OTHER; note = 2'-O-methylcytidine-3'-phosphate
  modified_base 5: mod_base = OTHER; note = 2'-O-methylcytidine-3'-phosphate
  modified_base 6: mod_base = OTHER; note = 2'-O-hexadecyl-cytidine-3'-phosphate
  modified_base 7: mod_base = OTHER; note = 2'-deoxy-2'-fluorouridine-3'-phosphate
  modified_base 8: mod_base = OTHER; note = 2'-O-methylguanosine-3'-phosphate
  modified_base 9: mod_base = OTHER; note = 2'-deoxy-2'-fluorocytidine-3'-phosphate
  modified_base 10: mod_base = OTHER; note = 2'-deoxy-2'-fluoroguanosine-3'-phosphate
  modified_base 11: mod_base = OTHER; note = 2'-deoxy-2'-fluoroguanosine-3'-phosphate
  modified_base 12: mod_base = OTHER; note = 2'-O-methyladenosine-3'-phosphate
  modified_base 13: mod_base = OTHER; note = 2'-O-methyladenosine-3'-phosphate
  modified_base 14: mod_base = OTHER; note = 2'-O-methylguanosine-3'-phosphate
  modified_base 15: mod_base = OTHER; note = 2'-O-methyladenosine-3'-phosphate
  modified_base 16: mod_base = OTHER; note = 2'-O-methyladenosine-3'-phosphate
  modified_base 17: mod_base = OTHER; note = 2'-O-methylcytidine-3'-phosphate
  modified_base 18: mod_base = OTHER; note = 2'-O-methylguanosine-3'-phosphate
  modified_base 19: mod_base = OTHER; note = 2'-O-methylcytidine-3'-phosphorothioate
  modified_base 20: mod_base = OTHER; note = 2'-O-methyluridine-3'-phosphorothioate
  modified_base 21: mod_base = OTHER; note = 2'-O-methyladenosine
agaccctgcggaagaacgcta

SEQ ID NO: 2025 - RNA, 21 nt, synthetic construct
  source 1..21: mol_type = other RNA
  modified_base 1: mod_base = OTHER; note = 2'-O-methyluridine-3'-phosphorothioate
  modified_base 2: mod_base = OTHER; note = 2'-O-methylguanosine-3'-phosphorothioate
  modified_base 3: mod_base = OTHER; note = 2'-O-methylcytidine-3'-phosphate
  modified_base 4: mod_base = OTHER; note = 2'-O-methylguanosine-3'-phosphate
  modified_base 5: mod_base = OTHER; note = 2'-O-methylguanosine-3'-phosphate
  modified_base 6: mod_base = OTHER; note = 2'-O-hexadecyl-adenosine-3'-phosphate
  modified_base 7: mod_base = OTHER; note = 2'-deoxy-2'-fluoroadenosine-3'-phosphate
  modified_base 8: mod_base = OTHER; note = 2'-O-methylguanosine-3'-phosphate
  modified_base 9: mod_base = OTHER; note = 2'-deoxy-2'-fluoroadenosine-3'-phosphate
  modified_base 10: mod_base = OTHER; note = 2'-deoxy-2'-fluoroadenosine-3'-phosphate
  modified_base 11: mod_base = OTHER; note = 2'-deoxy-2'-fluorocytidine-3'-phosphate
  modified_base 12: mod_base = OTHER; note = 2'-O-methylguanosine-3'-phosphate
  modified_base 13: mod_base = OTHER; note = 2'-O-methylcytidine-3'-phosphate
  modified_base 14: mod_base = OTHER; note = 2'-O-methyluridine-3'-phosphate
  modified_base 15: mod_base = OTHER; note = 2'-O-methylcytidine-3'-phosphate
  modified_base 16: mod_base = OTHER; note = 2'-O-methyladenosine-3'-phosphate
  modified_base 17: mod_base = OTHER; note = 2'-O-methyladenosine-3'-phosphate
  modified_base 18: mod_base = OTHER; note = 2'-O-methylguanosine-3'-phosphate
  modified_base 19: mod_base = OTHER; note = 2'-O-methyluridine-3'-phosphorothioate
  modified_base 20: mod_base = OTHER; note = 2'-O-methylcytidine-3'-phosphorothioate
  modified_base 21: mod_base = OTHER; note = 2'-O-methyladenosine
tgcggaagaacgctcaagtca

SEQ ID NO: 2026 - RNA, 21 nt, synthetic construct
  source 1..21: mol_type = other RNA
  modified_base 1: mod_base = OTHER; note = 2'-O-methyladenosine-3'-phosphorothioate
  modified_base 2: mod_base = OTHER; note = 2'-O-methyladenosine-3'-phosphorothioate
  modified_base 3: mod_base = OTHER; note = 2'-O-methylguanosine-3'-phosphate
  modified_base 4: mod_base = OTHER; note = 2'-O-methyladenosine-3'-phosphate
  modified_base 5: mod_base = OTHER; note = 2'-O-methyladenosine-3'-phosphate
  modified_base 6: mod_base = OTHER; note = 2'-O-hexadecyl-cytidine-3'-phosphate
  modified_base 7: mod_base = OTHER; note = 2'-deoxy-2'-fluoroguanosine-3'-phosphate
  modified_base 8: mod_base = OTHER; note = 2'-O-methylcytidine-3'-phosphate
  modified_base 9: mod_base = OTHER; note = 2'-deoxy-2'-fluorouridine-3'-phosphate
  modified_base 10: mod_base = OTHER; note = 2'-deoxy-2'-fluorocytidine-3'-phosphate
  modified_base 11: mod_base = OTHER; note = 2'-deoxy-2'-fluoroadenosine-3'-phosphate
  modified_base 12: mod_base = OTHER; note = 2'-O-methyladenosine-3'-phosphate
  modified_base 13: mod_base = OTHER; note = 2'-O-methylguanosine-3'-phosphate
  modified_base 14: mod_base = OTHER; note = 2'-O-methyluridine-3'-phosphate
  modified_base 15: mod_base = OTHER; note = 2'-O-methylcytidine-3'-phosphate
  modified_base 16: mod_base = OTHER; note = 2'-O-methyladenosine-3'-phosphate
  modified_base 17: mod_base = OTHER; note = 2'-O-methylguanosine-3'-phosphate
  modified_base 18: mod_base = OTHER; note = 2'-O-methyladenosine-3'-phosphate
  modified_base 19: mod_base = OTHER; note = 2'-O-methyladenosine-3'-phosphorothioate
  modified_base 20: mod_base = OTHER; note = 2'-O-methyladenosine-3'-phosphorothioate
  modified_base 21: mod_base = OTHER; note = 2'-O-methyladenosine
aagaacgctcaagtcagaaaa

SEQ ID NO: 2027 - RNA, 21 nt, synthetic construct
  source 1..21: mol_type = other RNA
  modified_base 1: mod_base = OTHER; note = 2'-O-methylcytidine-3'-phosphorothioate
  modified_base 2: mod_base = OTHER; note = 2'-O-methylguanosine-3'-phosphorothioate
  modified_base 3: mod_base = OTHER; note = 2'-O-methylcytidine-3'-phosphate
  modified_base 4: mod_base = OTHER; note = 2'-O-methyluridine-3'-phosphate
  modified_base 5: mod_base = OTHER; note = 2'-O-methylcytidine-3'-phosphate
  modified_base 6: mod_base = OTHER; note = 2'-O-hexadecyl-adenosine-3'-phosphate
  modified_base 7: mod_base = OTHER; note = 2'-deoxy-2'-fluoroadenosine-3'-phosphate
  modified_base 8: mod_base = OTHER; note = 2'-O-methylguanosine-3'-phosphate
  modified_base 9: mod_base = OTHER; note = 2'-deoxy-2'-fluorouridine-3'-phosphate
  modified_base 10: mod_base = OTHER; note = 2'-deoxy-2'-fluorocytidine-3'-phosphate
  modified_base 11: mod_base = OTHER; note = 2'-deoxy-2'-fluoroadenosine-3'-phosphate
  modified_base 12: mod_base = OTHER; note = 2'-O-methylguanosine-3'-phosphate
  modified_base 13: mod_base = OTHER; note = 2'-O-methyladenosine-3'-phosphate
  modified_base 14: mod_base = OTHER; note = 2'-O-methyladenosine-3'-phosphate
  modified_base 15: mod_base = OTHER; note = 2'-O-methyladenosine-3'-phosphate
  modified_base 16: mod_base = OTHER; note = 2'-O-methylguanosine-3'-phosphate
  modified_base 17: mod_base = OTHER; note = 2'-O-methyluridine-3'-phosphate
  modified_base 18: mod_base = OTHER; note = 2'-O-methylguanosine-3'-phosphate
  modified_base 19: mod_base = OTHER; note = 2'-O-methylcytidine-3'-phosphorothioate
  modified_base 20: mod_base = OTHER; note = 2'-O-methylcytidine-3'-phosphorothioate
  modified_base 21: mod_base = OTHER; note = 2'-O-methyladenosine
cgctcaagtcagaaagtgcca

SEQ ID NO: 2028 - RNA, 21 nt, synthetic construct
  source 1..21: mol_type = other RNA
  modified_base 1: mod_base = OTHER; note = 2'-O-methylguanosine-3'-phosphorothioate
  modified_base 2: mod_base = OTHER; note = 2'-O-methyluridine-3'-phosphorothioate
  modified_base 3: mod_base = OTHER; note = 2'-O-methyladenosine-3'-phosphate
  modified_base 4: mod_base = OTHER; note = 2'-O-methyladenosine-3'-phosphate
  modified_base 5: mod_base = OTHER; note = 2'-O-methyluridine-3'-phosphate
  modified_base 6: mod_base = OTHER; note = 2'-O-hexadecyl-cytidine-3'-phosphate
  modified_base 7: mod_base = OTHER; note = 2'-deoxy-2'-fluoroadenosine-3'-phosphate
  modified_base 8: mod_base = OTHER; note = 2'-O-methylcytidine-3'-phosphate
  modified_base 9: mod_base = OTHER; note = 2'-deoxy-2'-fluoroadenosine-3'-phosphate
  modified_base 10: mod_base = OTHER; note = 2'-deoxy-2'-fluoroguanosine-3'-phosphate
  modified_base 11: mod_base = OTHER; note = 2'-deoxy-2'-fluorouridine-3'-phosphate
  modified_base 12: mod_base = OTHER; note = 2'-O-methylcytidine-3'-phosphate
  modified_base 13: mod_base = OTHER; note = 2'-O-methylguanosine-3'-phosphate
  modified_base 14: mod_base = OTHER; note = 2'-O-methyladenosine-3'-phosphate
  modified_base 15: mod_base = OTHER; note = 2'-O-methyluridine-3'-phosphate
  modified_base 16: mod_base = OTHER; note = 2'-O-methylguanosine-3'-phosphate
  modified_base 17: mod_base = OTHER; note = 2'-O-methylcytidine-3'-phosphate
  modified_base 18: mod_base = OTHER; note = 2'-O-methyluridine-3'-phosphate
  modified_base 19: mod_base = OTHER; note = 2'-O-methyluridine-3'-phosphorothioate
  modified_base 20: mod_base = OTHER; note = 2'-O-methylcytidine-3'-phosphorothioate
  modified_base 21: mod_base = OTHER; note = 2'-O-methyladenosine
gtaatcacagtcgatgcttca

SEQ ID NO: 2029 - RNA, 21 nt, synthetic construct
  source 1..21: mol_type = other RNA
  modified_base 1: mod_base = OTHER; note = 2'-O-methyladenosine-3'-phosphorothioate
  modified_base 2: mod_base = OTHER; note = 2'-O-methylguanosine-3'-phosphorothioate
  modified_base 3: mod_base = OTHER; note = 2'-O-methyluridine-3'-phosphate
  modified_base 4: mod_base = OTHER; note = 2'-O-methylcytidine-3'-phosphate
  modified_base 5: mod_base = OTHER; note = 2'-O-methylguanosine-3'-phosphate
  modified_base 6: mod_base = OTHER; note = 2'-O-hexadecyl-adenosine-3'-phosphate
  modified_base 7: mod_base = OTHER; note = 2'-deoxy-2'-fluorouridine-3'-phosphate
  modified_base 8: mod_base = OTHER; note = 2'-O-methylguanosine-3'-phosphate
  modified_base 9: mod_base = OTHER; note = 2'-deoxy-2'-fluorocytidine-3'-phosphate
  modified_base 10: mod_base = OTHER; note = 2'-deoxy-2'-fluorouridine-3'-phosphate
  modified_base 11: mod_base = OTHER; note = 2'-deoxy-2'-fluorouridine-3'-phosphate
  modified_base 12: mod_base = OTHER; note = 2'-O-methylcytidine-3'-phosphate
  modified_base 13: mod_base = OTHER; note = 2'-O-methylcytidine-3'-phosphate
  modified_base 14: mod_base = OTHER; note = 2'-O-methyladenosine-3'-phosphate
  modified_base 15: mod_base = OTHER; note = 2'-O-methylguanosine-3'-phosphate
  modified_base 16: mod_base = OTHER; note = 2'-O-methyladenosine-3'-phosphate
  modified_base 17: mod_base = OTHER; note = 2'-O-methylcytidine-3'-phosphate
  modified_base 18: mod_base = OTHER; note = 2'-O-methylcytidine-3'-phosphate
  modified_base 19: mod_base = OTHER; note = 2'-O-methyladenosine-3'-phosphorothioate
  modified_base 20: mod_base = OTHER; note = 2'-O-methylcytidine-3'-phosphorothioate
  modified_base 21: mod_base = OTHER; note = 2'-O-methyladenosine
agtcgatgcttccagaccaca

SEQ ID NO: 2030 - RNA, 21 nt, synthetic construct
  source 1..21: mol_type = other RNA
  modified_base 1: mod_base = OTHER; note = 2'-O-methylguanosine-3'-phosphorothioate
  modified_base 2: mod_base = OTHER; note = 2'-O-methylcytidine-3'-phosphorothioate
  modified_base 3: mod_base = OTHER; note = 2'-O-methyluridine-3'-phosphate
  modified_base 4: mod_base = OTHER; note = 2'-O-methyluridine-3'-phosphate
  modified_base 5: mod_base = OTHER; note = 2'-O-methylcytidine-3'-phosphate
  modified_base 6: mod_base = OTHER; note = 2'-O-hexadecyl-cytidine-3'-phosphate
  modified_base 7: mod_base = OTHER; note = 2'-deoxy-2'-fluoroadenosine-3'-phosphate
  modified_base 8: mod_base = OTHER; note = 2'-O-methylguanosine-3'-phosphate
  modified_base 9: mod_base = OTHER; note = 2'-deoxy-2'-fluoroadenosine-3'-phosphate
  modified_base 10: mod_base = OTHER; note = 2'-deoxy-2'-fluorocytidine-3'-phosphate
  modified_base 11: mod_base = OTHER; note = 2'-deoxy-2'-fluorocytidine-3'-phosphate
  modified_base 12: mod_base = OTHER; note = 2'-O-methyladenosine-3'-phosphate
  modified_base 13: mod_base = OTHER; note = 2'-O-methylcytidine-3'-phosphate
  modified_base 14: mod_base = OTHER; note = 2'-O-methyladenosine-3'-phosphate
  modified_base 15: mod_base = OTHER; note = 2'-O-methylguanosine-3'-phosphate
  modified_base 16: mod_base = OTHER; note = 2'-O-methylcytidine-3'-phosphate
  modified_base 17: mod_base = OTHER; note = 2'-O-methylcytidine-3'-phosphate
  modified_base 18: mod_base = OTHER; note = 2'-O-methyluridine-3'-phosphate
  modified_base 19: mod_base = OTHER; note = 2'-O-methyluridine-3'-phosphorothioate
  modified_base 20: mod_base = OTHER; note = 2'-O-methyluridine-3'-phosphorothioate
  modified_base 21: mod_base = OTHER; note = 2'-O-methyladenosine
gcttccagaccacagccttta

SEQ ID NO: 2031 - RNA, 21 nt, synthetic construct
  source 1..21: mol_type = other RNA
  modified_base 1: mod_base = OTHER; note = 2'-O-methylcytidine-3'-phosphorothioate
  modified_base 2: mod_base = OTHER; note = 2'-O-methyladenosine-3'-phosphorothioate
  modified_base 3: mod_base = OTHER; note = 2'-O-methylguanosine-3'-phosphate
  modified_base 4: mod_base = OTHER; note = 2'-O-methyladenosine-3'-phosphate
  modified_base 5: mod_base = OTHER; note = 2'-O-methylcytidine-3'-phosphate
  modified_base 6: mod_base = OTHER; note = 2'-O-hexadecyl-cytidine-3'-phosphate
  modified_base 7: mod_base = OTHER; note = 2'-deoxy-2'-fluoroadenosine-3'-phosphate
  modified_base 8: mod_base = OTHER; note = 2'-O-methylcytidine-3'-phosphate
  modified_base 9: mod_base = OTHER; note = 2'-deoxy-2'-fluoroadenosine-3'-phosphate
  modified_base 10: mod_base = OTHER; note = 2'-deoxy-2'-fluoroguanosine-3'-phosphate
  modified_base 11: mod_base = OTHER; note = 2'-deoxy-2'-fluorocytidine-3'-phosphate
  modified_base 12: mod_base = OTHER; note = 2'-O-methylcytidine-3'-phosphate
  modified_base 13: mod_base = OTHER; note = 2'-O-methyluridine-3'-phosphate
  modified_base 14: mod_base = OTHER; note = 2'-O-methyluridine-3'-phosphate
  modified_base 15: mod_base = OTHER; note = 2'-O-methyluridine-3'-phosphate
  modified_base 16: mod_base = OTHER; note = 2'-O-methylcytidine-3'-phosphate
  modified_base 17: mod_base = OTHER; note = 2'-O-methyladenosine-3'-phosphate
  modified_base 18: mod_base = OTHER; note = 2'-O-methyluridine-3'-phosphate
  modified_base 19: mod_base = OTHER; note = 2'-O-methylguanosine-3'-phosphorothioate
  modified_base 20: mod_base = OTHER; note = 2'-O-methylguanosine-3'-phosphorothioate
  modified_base 21: mod_base = OTHER; note = 2'-O-methyladenosine
cagaccacagcctttcatgga

SEQ ID NO: 2032 - RNA, 21 nt, synthetic construct
  source 1..21: mol_type = other RNA
  modified_base 1: mod_base = OTHER; note = 2'-O-methylguanosine-3'-phosphorothioate
  modified_base 2: mod_base = OTHER; note = 2'-O-methyluridine-3'-phosphorothioate
  modified_base 3: mod_base = OTHER; note = 2'-O-methylguanosine-3'-phosphate
  modified_base 4: mod_base = OTHER; note = 2'-O-methylguanosine-3'-phosphate
  modified_base 5: mod_base = OTHER; note = 2'-O-methyladenosine-3'-phosphate
  modified_base 6: mod_base = OTHER; note = 2'-O-hexadecyl-guanosine-3'-phosphate
  modified_base 7: mod_base = OTHER; note = 2'-deoxy-2'-fluoroadenosine-3'-phosphate
  modified_base 8: mod_base = OTHER; note = 2'-O-methyluridine-3'-phosphate
  modified_base 9: mod_base = OTHER; note = 2'-deoxy-2'-fluorocytidine-3'-phosphate
  modified_base 10: mod_base = OTHER; note = 2'-deoxy-2'-fluorocytidine-3'-phosphate
  modified_base 11: mod_base = OTHER; note = 2'-deoxy-2'-fluorocytidine-3'-phosphate
  modified_base 12: mod_base = OTHER; note = 2'-O-methyladenosine-3'-phosphate
  modified_base 13: mod_base = OTHER; note = 2'-O-methyluridine-3'-phosphate
  modified_base 14: mod_base = OTHER; note = 2'-O-methylcytidine-3'-phosphate
  modified_base 15: mod_base = OTHER; note = 2'-O-methylcytidine-3'-phosphate
  modified_base 16: mod_base = OTHER; note = 2'-O-methyladenosine-3'-phosphate
  modified_base 17: mod_base = OTHER; note = 2'-O-methylguanosine-3'-phosphate
  modified_base 18: mod_base = OTHER; note = 2'-O-methyluridine-3'-phosphate
  modified_base 19: mod_base = OTHER; note = 2'-O-methylguanosine-3'-phosphorothioate
  modified_base 20: mod_base = OTHER; note = 2'-O-methyluridine-3'-phosphorothioate
  modified_base 21: mod_base = OTHER; note = 2'-O-methyladenosine
gtggagatcccatccagtgta

SEQ ID NO: 2033 - RNA, 21 nt, synthetic construct
  source 1..21: mol_type = other RNA
  modified_base 1: mod_base = OTHER; note = 2'-O-methylguanosine-3'-phosphorothioate
  modified_base 2: mod_base = OTHER; note = 2'-O-methyladenosine-3'-phosphorothioate
  modified_base 3: mod_base = OTHER; note = 2'-O-methyluridine-3'-phosphate
  modified_base 4: mod_base = OTHER; note = 2'-O-methylcytidine-3'-phosphate
  modified_base 5: mod_base = OTHER; note = 2'-O-methylcytidine-3'-phosphate
  modified_base 6: mod_base = OTHER; note = 2'-O-hexadecyl-cytidine-3'-phosphate
  modified_base 7: mod_base = OTHER; note = 2'-deoxy-2'-fluoroadenosine-3'-phosphate
  modified_base 8: mod_base = OTHER; note = 2'-O-methyluridine-3'-phosphate
  modified_base 9: mod_base = OTHER; note = 2'-deoxy-2'-fluorocytidine-3'-phosphate
  modified_base 10: mod_base = OTHER; note = 2'-deoxy-2'-fluorocytidine-3'-phosphate
  modified_base 11: mod_base = OTHER; note = 2'-deoxy-2'-fluoroadenosine-3'-phosphate
  modified_base 12: mod_base = OTHER; note = 2'-O-methylguanosine-3'-phosphate
  modified_base 13: mod_base = OTHER; note = 2'-O-methyluridine-3'-phosphate
  modified_base 14: mod_base = OTHER; note = 2'-O-methylguanosine-3'-phosphate
  modified_base 15: mod_base = OTHER; note = 2'-O-methyluridine-3'-phosphate
  modified_base 16: mod_base = OTHER; note = 2'-O-methylguanosine-3'-phosphate
  modified_base 17: mod_base = OTHER; note = 2'-O-methylcytidine-3'-phosphate
  modified_base 18: mod_base = OTHER; note = 2'-O-methylcytidine-3'-phosphate
  modified_base 19: mod_base = OTHER; note = 2'-O-methyladenosine-3'-phosphorothioate
  modified_base 20: mod_base = OTHER; note = 2'-O-methyluridine-3'-phosphorothioate
  modified_base 21: mod_base = OTHER; note = 2'-O-methyladenosine
gatcccatccagtgtgccata

SEQ ID NO: 2034 - RNA, 21 nt, synthetic construct
  source 1..21: mol_type = other RNA
  modified_base 1: mod_base = OTHER; note = 2'-O-methyluridine-3'-phosphorothioate
  modified_base 2: mod_base = OTHER; note = 2'-O-methylguanosine-3'-phosphorothioate
  modified_base 3: mod_base = OTHER; note = 2'-O-methylcytidine-3'-phosphate
  modified_base 4: mod_base = OTHER; note = 2'-O-methylcytidine-3'-phosphate
  modified_base 5: mod_base = OTHER; note = 2'-O-methylguanosine-3'-phosphate
  modified_base 6: mod_base = OTHER; note = 2'-O-hexadecyl-guanosine-3'-phosphate
  modified_base 7: mod_base = OTHER; note = 2'-deoxy-2'-fluorocytidine-3'-phosphate
  modified_base 8: mod_base = OTHER; note = 2'-O-methyluridine-3'-phosphate
  modified_base 9: mod_base = OTHER; note = 2'-deoxy-2'-fluorocytidine-3'-phosphate
  modified_base 10: mod_base = OTHER; note = 2'-deoxy-2'-fluorouridine-3'-phosphate
  modified_base 11: mod_base = OTHER; note = 2'-deoxy-2'-fluoroguanosine-3'-phosphate
  modified_base 12: mod_base = OTHER; note = 2'-O-methyluridine-3'-phosphate
  modified_base 13: mod_base = OTHER; note = 2'-O-methyladenosine-3'-phosphate
  modified_base 14: mod_base = OTHER; note = 2'-O-methyluridine-3'-phosphate
  modified_base 15: mod_base = OTHER; note = 2'-O-methyladenosine-3'-phosphate
  modified_base 16: mod_base = OTHER; note = 2'-O-methylguanosine-3'-phosphate
  modified_base 17: mod_base = OTHER; note = 2'-O-methylguanosine-3'-phosphate
  modified_base 18: mod_base = OTHER; note = 2'-O-methyladenosine-3'-phosphate
  modified_base 19: mod_base = OTHER; note = 2'-O-methyladenosine-3'-phosphorothioate
  modified_base 20: mod_base = OTHER; note = 2'-O-methylcytidine-3'-phosphorothioate
  modified_base 21: mod_base = OTHER; note = 2'-O-methyladenosine
tgccggctctgtataggaaca

SEQ ID NO: 2035 - RNA, 21 nt, synthetic construct
  source 1..21: mol_type = other RNA
  modified_base 1: mod_base = OTHER; note = 2'-O-methylguanosine-3'-phosphorothioate
  modified_base 2: mod_base = OTHER; note = 2'-O-methylcytidine-3'-phosphorothioate
  modified_base 3: mod_base = OTHER; note = 2'-O-methyluridine-3'-phosphate
  modified_base 4: mod_base = OTHER; note = 2'-O-methylcytidine-3'-phosphate
  modified_base 5: mod_base = OTHER; note = 2'-O-methyluridine-3'-phosphate
  modified_base 6: mod_base = OTHER; note = 2'-O-hexadecyl-guanosine-3'-phosphate
  modified_base 7: mod_base = OTHER; note = 2'-deoxy-2'-fluorouridine-3'-phosphate
  modified_base 8: mod_base = OTHER; note = 2'-O-methyladenosine-3'-phosphate
  modified_base 9: mod_base = OTHER; note = 2'-deoxy-2'-fluorouridine-3'-phosphate
  modified_base 10: mod_base = OTHER; note = 2'-deoxy-2'-fluoroadenosine-3'-phosphate
  modified_base 11: mod_base = OTHER; note = 2'-deoxy-2'-fluoroguanosine-3'-phosphate
  modified_base 12: mod_base = OTHER; note = 2'-O-methylguanosine-3'-phosphate
  modified_base 13: mod_base = OTHER; note = 2'-O-methyladenosine-3'-phosphate
  modified_base 14: mod_base = OTHER; note = 2'-O-methyladenosine-3'-phosphate
  modified_base 15: mod_base = OTHER; note = 2'-O-methylcytidine-3'-phosphate
  modified_base 16: mod_base = OTHER; note = 2'-O-methylcytidine-3'-phosphate
  modified_base 17: mod_base = OTHER; note = 2'-O-methyladenosine-3'-phosphate
  modified_base 18: mod_base = OTHER; note = 2'-O-methylguanosine-3'-phosphate
  modified_base 19: mod_base = OTHER; note = 2'-O-methyladenosine-3'-phosphorothioate
  modified_base 20: mod_base = OTHER; note = 2'-O-methyladenosine-3'-phosphorothioate
  modified_base 21: mod_base = OTHER; note = 2'-O-methyladenosine
gctctgtataggaaccagaaa

SEQ ID NO: 2036 - RNA, 21 nt, synthetic construct
  source 1..21: mol_type = other RNA
  modified_base 1: mod_base = OTHER; note = 2'-O-methylguanosine-3'-phosphorothioate
  modified_base 2: mod_base = OTHER; note = 2'-O-methyluridine-3'-phosphorothioate
  modified_base 3: mod_base = OTHER; note = 2'-O-methyladenosine-3'-phosphate
  modified_base 4: mod_base = OTHER; note = 2'-O-methyluridine-3'-phosphate
  modified_base 5: mod_base = OTHER; note = 2'-O-methyladenosine-3'-phosphate
  modified_base 6: mod_base = OTHER; note = 2'-O-hexadecyl-guanosine-3'-phosphate
  modified_base 7: mod_base = OTHER; note = 2'-deoxy-2'-fluoroguanosine-3'-phosphate
  modified_base 8: mod_base = OTHER; note = 2'-O-methyladenosine-3'-phosphate
  modified_base 9: mod_base = OTHER; note = 2'-deoxy-2'-fluoroadenosine-3'-phosphate
  modified_base 10: mod_base = OTHER; note = 2'-deoxy-2'-fluorocytidine-3'-phosphate
  modified_base 11: mod_base = OTHER; note = 2'-deoxy-2'-fluorocytidine-3'-phosphate
  modified_base 12: mod_base = OTHER; note = 2'-O-methyladenosine-3'-phosphate
  modified_base 13: mod_base = OTHER; note = 2'-O-methylguanosine-3'-phosphate
  modified_base 14: mod_base = OTHER; note = 2'-O-methyladenosine-3'-phosphate
  modified_base 15: mod_base = OTHER; note = 2'-O-methyladenosine-3'-phosphate
  modified_base 16: mod_base = OTHER; note = 2'-O-methyluridine-3'-phosphate
  modified_base 17: mod_base = OTHER; note = 2'-O-methyluridine-3'-phosphate
  modified_base 18: mod_base = OTHER; note = 2'-O-methyladenosine-3'-phosphate
  modified_base 19: mod_base = OTHER; note = 2'-O-methylcytidine-3'-phosphorothioate
  modified_base 20: mod_base = OTHER; note = 2'-O-methyladenosine-3'-phosphorothioate
  modified_base 21: mod_base = OTHER; note = 2'-O-methyladenosine
gtataggaaccagaattacaa

SEQ ID NO: 2037 - RNA, 21 nt, synthetic construct
  source 1..21: mol_type = other RNA
  modified_base 1: mod_base = OTHER; note = 2'-O-methylguanosine-3'-phosphorothioate
  modified_base 2: mod_base = OTHER; note = 2'-O-methyladenosine-3'-phosphorothioate
  modified_base 3: mod_base = OTHER; note = 2'-O-methyladenosine-3'-phosphate
  modified_base 4: mod_base = OTHER; note = 2'-O-methylcytidine-3'-phosphate
  modified_base 5: mod_base = OTHER; note = 2'-O-methylcytidine-3'-phosphate
  modified_base 6: mod_base = OTHER; note = 2'-O-hexadecyl-adenosine-3'-phosphate
  modified_base 7: mod_base = OTHER; note = 2'-deoxy-2'-fluoroguanosine-3'-phosphate
  modified_base 8: mod_base = OTHER; note = 2'-O-methyladenosine-3'-phosphate
  modified_base 9: mod_base = OTHER; note = 2'-deoxy-2'-fluoroadenosine-3'-phosphate
  modified_base 10: mod_base = OTHER; note = 2'-deoxy-2'-fluorouridine-3'-phosphate
  modified_base 11: mod_base = OTHER; note = 2'-deoxy-2'-fluorouridine-3'-phosphate
  modified_base 12: mod_base = OTHER; note = 2'-O-methyladenosine-3'-phosphate
  modified_base 13: mod_base = OTHER; note = 2'-O-methylcytidine-3'-phosphate
  modified_base 14: mod_base = OTHER; note = 2'-O-methyladenosine-3'-phosphate
  modified_base 15: mod_base = OTHER; note = 2'-O-methyladenosine-3'-phosphate
  modified_base 16: mod_base = OTHER; note = 2'-O-methylcytidine-3'-phosphate
  modified_base 17: mod_base = OTHER; note = 2'-O-methyladenosine-3'-phosphate
  modified_base 18: mod_base = OTHER; note = 2'-O-methyladenosine-3'-phosphate
  modified_base 19: mod_base = OTHER; note = 2'-O-methyladenosine-3'-phosphorothioate
  modified_base 20: mod_base = OTHER; note = 2'-O-methylcytidine-3'-phosphorothioate
  modified_base 21: mod_base = OTHER; note = 2'-O-methyladenosine
gaaccagaattacaacaaaca

SEQ ID NO: 2038 - RNA, 21 nt, synthetic construct
  source 1..21: mol_type = other RNA
  modified_base 1: mod_base = OTHER; note = 2'-O-methyladenosine-3'-phosphorothioate
  modified_base 2: mod_base = OTHER; note = 2'-O-methyladenosine-3'-phosphorothioate
  modified_base 3: mod_base = OTHER; note = 2'-O-methyluridine-3'-phosphate
  modified_base 4: mod_base = OTHER; note = 2'-O-methyluridine-3'-phosphate
  modified_base 5: mod_base = OTHER; note = 2'-O-methyladenosine-3'-phosphate
  modified_base 6: mod_base = OTHER; note = 2'-O-hexadecyl-cytidine-3'-phosphate
  modified_base 7: mod_base = OTHER; note = 2'-deoxy-2'-fluoroadenosine-3'-phosphate
  modified_base 8: mod_base = OTHER; note = 2'-O-methyladenosine-3'-phosphate
  modified_base 9: mod_base = OTHER; note = 2'-deoxy-2'-fluorocytidine-3'-phosphate
  modified_base 10: mod_base = OTHER; note = 2'-deoxy-2'-fluoroadenosine-3'-phosphate
  modified_base 11: mod_base = OTHER; note = 2'-deoxy-2'-fluoroadenosine-3'-phosphate
  modified_base 12: mod_base = OTHER; note = 2'-O-methyladenosine-3'-phosphate
  modified_base 13: mod_base = OTHER; note = 2'-O-methylcytidine-3'-phosphate
  modified_base 14: mod_base = OTHER; note = 2'-O-methyluridine-3'-phosphate
  modified_base 15: mod_base = OTHER; note = 2'-O-methylguanosine-3'-phosphate
  modified_base 16: mod_base = OTHER; note = 2'-O-methylcytidine-3'-phosphate
  modified_base 17: mod_base = OTHER; note = 2'-O-methyladenosine-3'-phosphate
  modified_base 18: mod_base = OTHER; note = 2'-O-methylguanosine-3'-phosphate
  modified_base 19: mod_base = OTHER; note = 2'-O-methylcytidine-3'-phosphorothioate
  modified_base 20: mod_base = OTHER; note = 2'-O-methyladenosine-3'-phosphorothioate
  modified_base 21: mod_base = OTHER; note = 2'-O-methyladenosine
aattacaacaaactgcagcaa

SEQ ID NO: 2039 - RNA, 21 nt, synthetic construct
  source 1..21: mol_type = other RNA
  modified_base 1: mod_base = OTHER; note = 2'-O-methyladenosine-3'-phosphorothioate
  modified_base 2: mod_base = OTHER; note = 2'-O-methyladenosine-3'-phosphorothioate
  modified_base 3: mod_base = OTHER; note = 2'-O-methylcytidine-3'-phosphate
  modified_base 4: mod_base = OTHER; note = 2'-O-methyladenosine-3'-phosphate
  modified_base 5: mod_base = OTHER; note = 2'-O-methyladenosine-3'-phosphate
  modified_base 6: mod_base = OTHER; note = 2'-O-hexadecyl-adenosine-3'-phosphate
  modified_base 7: mod_base = OTHER; note = 2'-deoxy-2'-fluorocytidine-3'-phosphate
  modified_base 8: mod_base = OTHER; note = 2'-O-methyluridine-3'-phosphate
  modified_base 9: mod_base = OTHER; note = 2'-deoxy-2'-fluoroguanosine-3'-phosphate
  modified_base 10: mod_base = OTHER; note = 2'-deoxy-2'-fluorocytidine-3'-phosphate
  modified_base 11: mod_base = OTHER; note = 2'-deoxy-2'-fluoroadenosine-3'-phosphate
  modified_base 12: mod_base = OTHER; note = 2'-O-methylguanosine-3'-phosphate
  modified_base 13: mod_base = OTHER; note = 2'-O-methylcytidine-3'-phosphate
  modified_base 14: mod_base = OTHER; note = 2'-O-methyladenosine-3'-phosphate
  modified_base 15: mod_base = OTHER; note = 2'-O-methylcytidine-3'-phosphate
  modified_base 16: mod_base = OTHER; note = 2'-O-methylguanosine-3'-phosphate
  modified_base 17: mod_base = OTHER; note = 2'-O-methyluridine-3'-phosphate
  modified_base 18: mod_base = OTHER; note = 2'-O-methyluridine-3'-phosphate
  modified_base 19: mod_base = OTHER; note = 2'-O-methylcytidine-3'-phosphorothioate
  modified_base 20: mod_base = OTHER; note = 2'-O-methyladenosine-3'-phosphorothioate
  modified_base 21: mod_base = OTHER; note = 2'-O-methyladenosine
aacaaactgcagcacgttcaa

SEQ ID NO: 2040 - RNA, 21 nt, synthetic construct
  source 1..21: mol_type = other RNA
  modified_base 1: mod_base = OTHER; note = 2'-O-methylcytidine-3'-phosphorothioate
  modified_base 2: mod_base = OTHER; note = 2'-O-methyluridine-3'-phosphorothioate
  modified_base 3: mod_base = OTHER; note = 2'-O-methylguanosine-3'-phosphate
  modified_base 4: mod_base = OTHER; note = 2'-O-methylcytidine-3'-phosphate
  modified_base 5: mod_base = OTHER; note = 2'-O-methyladenosine-3'-phosphate
  modified_base 6: mod_base = OTHER; note = 2'-O-hexadecyl-guanosine-3'-phosphate
  modified_base 7: mod_base = OTHER; note = 2'-deoxy-2'-fluorocytidine-3'-phosphate
  modified_base 8: mod_base = OTHER; note = 2'-O-methyladenosine-3'-phosphate
  modified_base 9: mod_base = OTHER; note = 2'-deoxy-2'-fluorocytidine-3'-phosphate
  modified_base 10: mod_base = OTHER; note = 2'-deoxy-2'-fluoroguanosine-3'-phosphate
  modified_base 11: mod_base = OTHER; note = 2'-deoxy-2'-fluorouridine-3'-phosphate
  modified_base 12: mod_base = OTHER; note = 2'-O-methyluridine-3'-phosphate
  modified_base 13: mod_base = OTHER; note = 2'-O-methylcytidine-3'-phosphate
  modified_base 14: mod_base = OTHER; note = 2'-O-methyladenosine-3'-phosphate
  modified_base 15: mod_base = OTHER; note = 2'-O-methylguanosine-3'-phosphate
  modified_base 16: mod_base = OTHER; note = 2'-O-methyladenosine-3'-phosphate
  modified_base 17: mod_base = OTHER; note = 2'-O-methylcytidine-3'-phosphate
  modified_base 18: mod_base = OTHER; note = 2'-O-methylcytidine-3'-phosphate
  modified_base 19: mod_base = OTHER; note = 2'-O-methylcytidine-3'-phosphorothioate
  modified_base 20: mod_base = OTHER; note = 2'-O-methylguanosine-3'-phosphorothioate
  modified_base 21: mod_base = OTHER; note = 2'-O-methyladenosine
ctgcagcacgttcagacccga

SEQ ID NO: 2041 - RNA, 21 nt, synthetic construct
  source 1..21: mol_type = other RNA
  modified_base 1: mod_base = OTHER; note = 2'-O-methylcytidine-3'-phosphorothioate
  modified_base 2: mod_base = OTHER; note = 2'-O-methyladenosine-3'-phosphorothioate
  modified_base 3: mod_base = OTHER; note = 2'-O-methylcytidine-3'-phosphate
  modified_base 4: mod_base = OTHER; note = 2'-O-methylguanosine-3'-phosphate
  modified_base 5: mod_base = OTHER; note = 2'-O-methyluridine-3'-phosphate
  modified_base 6: mod_base = OTHER; note = 2'-O-hexadecyl-uridine-3'-phosphate
  modified_base 7: mod_base = OTHER; note = 2'-deoxy-2'-fluorocytidine-3'-phosphate
  modified_base 8: mod_base = OTHER; note = 2'-O-methyladenosine-3'-phosphate
  modified_base 9: mod_base = OTHER; note = 2'-deoxy-2'-fluoroguanosine-3'-phosphate
  modified_base 10: mod_base = OTHER; note = 2'-deoxy-2'-fluoroadenosine-3'-phosphate
  modified_base 11: mod_base = OTHER; note = 2'-deoxy-2'-fluorocytidine-3'-phosphate
  modified_base 12: mod_base = OTHER; note = 2'-O-methylcytidine-3'-phosphate
  modified_base 13: mod_base = OTHER; note = 2'-O-methylcytidine-3'-phosphate
  modified_base 14: mod_base = OTHER; note = 2'-O-methylguanosine-3'-phosphate
  modified_base 15: mod_base = OTHER; note = 2'-O-methyluridine-3'-phosphate
  modified_base 16: mod_base = OTHER; note = 2'-O-methylguanosine-3'-phosphate
  modified_base 17: mod_base = OTHER; note = 2'-O-methylguanosine-3'-phosphate
  modified_base 18: mod_base = OTHER; note = 2'-O-methyladenosine-3'-phosphate
  modified_base 19: mod_base = OTHER; note = 2'-O-methyluridine-3'-phosphorothioate
  modified_base 20: mod_base = OTHER; note = 2'-O-methyladenosine-3'-phosphorothioate
  modified_base 21: mod_base = OTHER; note = 2'-O-methyladenosine
cacgttcagacccgtggataa

SEQ ID NO: 2042 - RNA, 21 nt, synthetic construct
  source 1..21: mol_type = other RNA
  modified_base 1: mod_base = OTHER; note = 2'-O-methylcytidine-3'-phosphorothioate
  modified_base 2: mod_base = OTHER; note = 2'-O-methyladenosine-3'-phosphorothioate
  modified_base 3: mod_base = OTHER; note = 2'-O-methylguanosine-3'-phosphate
  modified_base 4: mod_base = OTHER; note = 2'-O-methyladenosine-3'-phosphate
  modified_base 5: mod_base = OTHER; note = 2'-O-methylcytidine-3'-phosphate
  modified_base 6: mod_base = OTHER; note = 2'-O-hexadecyl-cytidine-3'-phosphate
  modified_base 7: mod_base = OTHER; note = 2'-deoxy-2'-fluorocytidine-3'-phosphate
  modified_base 8: mod_base = OTHER; note = 2'-O-methylguanosine-3'-phosphate
  modified_base 9: mod_base = OTHER; note = 2'-deoxy-2'-fluorouridine-3'-phosphate
  modified_base 10: mod_base = OTHER; note = 2'-deoxy-2'-fluoroguanosine-3'-phosphate
  modified_base 11: mod_base = OTHER; note = 2'-deoxy-2'-fluoroguanosine-3'-phosphate
  modified_base 12: mod_base = OTHER; note = 2'-O-methyladenosine-3'-phosphate
  modified_base 13: mod_base = OTHER; note = 2'-O-methyluridine-3'-phosphate
  modified_base 14: mod_base = OTHER; note = 2'-O-methyladenosine-3'-phosphate
  modified_base 15: mod_base = OTHER; note = 2'-O-methyluridine-3'-phosphate
  modified_base 16: mod_base = OTHER; note = 2'-O-methyladenosine-3'-phosphate
  modified_base 17: mod_base = OTHER; note = 2'-O-methylcytidine-3'-phosphate
  modified_base 18: mod_base = OTHER; note = 2'-O-methylcytidine-3'-phosphate
  modified_base 19: mod_base = OTHER; note = 2'-O-methyladenosine-3'-phosphorothioate
  modified_base 20: mod_base = OTHER; note = 2'-O-methyladenosine-3'-phosphorothioate
  modified_base 21: mod_base = OTHER; note = 2'-O-methyladenosine
cagacccgtggatataccaaa

SEQ ID NO: 2043 - RNA, 21 nt, synthetic construct
  source 1..21: mol_type = other RNA
  modified_base 1: mod_base = OTHER; note = 2'-O-methylcytidine-3'-phosphorothioate
  modified_base 2: mod_base = OTHER; note = 2'-O-methylcytidine-3'-phosphorothioate
  modified_base 3: mod_base = OTHER; note = 2'-O-methylguanosine-3'-phosphate
  modified_base 4: mod_base = OTHER; note = 2'-O-methyluridine-3'-phosphate
  modified_base 5: mod_base = OTHER; note = 2'-O-methylguanosine-3'-phosphate
  modified_base 6: mod_base = OTHER; note = 2'-O-hexadecyl-guanosine-3'-phosphate
  modified_base 7: mod_base = OTHER; note = 2'-deoxy-2'-fluoroadenosine-3'-phosphate
  modified_base 8: mod_base = OTHER; note = 2'-O-methyluridine-3'-phosphate
  modified_base 9: mod_base = OTHER; note = 2'-deoxy-2'-fluoroadenosine-3'-phosphate
  modified_base 10: mod_base = OTHER; note = 2'-deoxy-2'-fluorouridine-3'-phosphate
  modified_base 11: mod_base = OTHER; note = 2'-deoxy-2'-fluoroadenosine-3'-phosphate
  modified_base 12: mod_base = OTHER; note = 2'-O-methylcytidine-3'-phosphate
  modified_base 13: mod_base = OTHER; note = 2'-O-methylcytidine-3'-phosphate
  modified_base 14: mod_base = OTHER; note = 2'-O-methyladenosine-3'-phosphate
  modified_base 15: mod_base = OTHER; note = 2'-O-methyladenosine-3'-phosphate
  modified_base 16: mod_base = OTHER; note = 2'-O-methylguanosine-3'-phosphate
  modified_base 17: mod_base = OTHER; note = 2'-O-methyladenosine-3'-phosphate
  modified_base 18: mod_base = OTHER; note = 2'-O-methylguanosine-3'-phosphate
  modified_base 19: mod_base = OTHER; note = 2'-O-methyluridine-3'-phosphorothioate
  modified_base 20: mod_base = OTHER; note = 2'-O-methylcytidine-3'-phosphorothioate
  modified_base 21: mod_base = OTHER; note = 2'-O-methyladenosine
ccgtggatataccaagagtca

SEQ ID NO: 2044 - RNA, 21 nt, synthetic construct
  source 1..21: mol_type = other RNA
  modified_base 1: mod_base = OTHER; note = 2'-O-methylguanosine-3'-phosphorothioate
  modified_base 2: mod_base = OTHER; note = 2'-O-methyladenosine-3'-phosphorothioate
  modified_base 3: mod_base = OTHER; note = 2'-O-methyluridine-3'-phosphate
  modified_base 4: mod_base = OTHER; note = 2'-O-methyladenosine-3'-phosphate
  modified_base 5: mod_base = OTHER; note = 2'-O-methyluridine-3'-phosphate
  modified_base 6: mod_base = OTHER; note = 2'-O-hexadecyl-adenosine-3'-phosphate
  modified_base 7: mod_base = OTHER; note = 2'-deoxy-2'-fluorocytidine-3'-phosphate
  modified_base 8: mod_base = OTHER; note = 2'-O-methylcytidine-3'-phosphate
  modified_base 9: mod_base = OTHER; note = 2'-deoxy-2'-fluoroadenosine-3'-phosphate
  modified_base 10: mod_base = OTHER; note = 2'-deoxy-2'-fluoroadenosine-3'-phosphate
  modified_base 11: mod_base = OTHER; note = 2'-deoxy-2'-fluoroguanosine-3'-phosphate
  modified_base 12: mod_base = OTHER; note = 2'-O-methyladenosine-3'-phosphate
  modified_base 13: mod_base = OTHER; note = 2'-O-methylguanosine-3'-phosphate
  modified_base 14: mod_base = OTHER; note = 2'-O-methyluridine-3'-phosphate
  modified_base 15: mod_base = OTHER; note = 2'-O-methylcytidine-3'-phosphate
  modified_base 16: mod_base = OTHER; note = 2'-O-methylcytidine-3'-phosphate
  modified_base 17: mod_base = OTHER; note = 2'-O-methylcytidine-3'-phosphate
  modified_base 18: mod_base = OTHER; note = 2'-O-methyladenosine-3'-phosphate
  modified_base 19: mod_base = OTHER; note = 2'-O-methyladenosine-3'-phosphorothioate
  modified_base 20: mod_base = OTHER; note = 2'-O-methylcytidine-3'-phosphorothioate
  modified_base 21: mod_base = OTHER; note = 2'-O-methyladenosine
gatataccaagagtcccaaca

SEQ ID NO: 2045 - RNA, 21 nt, synthetic construct
  source 1..21: mol_type = other RNA
  modified_base 1: mod_base = OTHER; note = 2'-O-methyladenosine-3'-phosphorothioate
  modified_base 2: mod_base = OTHER; note = 2'-O-methylcytidine-3'-phosphorothioate
  modified_base 3: mod_base = OTHER; note = 2'-O-methylcytidine-3'-phosphate
  modified_base 4: mod_base = OTHER; note = 2'-O-methyladenosine-3'-phosphate
  modified_base 5: mod_base = OTHER; note = 2'-O-methyladenosine-3'-phosphate
  modified_base 6: mod_base = OTHER; note = 2'-O-hexadecyl-guanosine-3'-phosphate
  modified_base 7: mod_base = OTHER; note = 2'-deoxy-2'-fluoroadenosine-3'-phosphate
  modified_base 8: mod_base = OTHER; note = 2'-O-methylguanosine-3'-phosphate
  modified_base 9: mod_base = OTHER; note = 2'-deoxy-2'-fluorouridine-3'-phosphate
  modified_base 10: mod_base = OTHER; note = 2'-deoxy-2'-fluorocytidine-3'-phosphate
  modified_base 11: mod_base = OTHER; note = 2'-deoxy-2'-fluorocytidine-3'-phosphate
  modified_base 12: mod_base = OTHER; note = 2'-O-methylcytidine-3'-phosphate
  modified_base 13: mod_base = OTHER; note = 2'-O-methyladenosine-3'-phosphate
  modified_base 14: mod_base = OTHER; note = 2'-O-methyladenosine-3'-phosphate
  modified_base 15: mod_base = OTHER; note = 2'-O-methylcytidine-3'-phosphate
  modified_base 16: mod_base = OTHER; note = 2'-O-methylcytidine-3'-phosphate
  modified_base 17: mod_base = OTHER; note = 2'-O-methyladenosine-3'-phosphate
  modified_base 18: mod_base = OTHER; note = 2'-O-methyladenosine-3'-phosphate
  modified_base 19: mod_base = OTHER; note = 2'-O-methylcytidine-3'-phosphorothioate
  modified_base 20: mod_base = OTHER; note = 2'-O-methyluridine-3'-phosphorothioate
  modified_base 21: mod_base = OTHER; note = 2'-O-methyladenosine
accaagagtcccaaccaacta

SEQ ID NO: 2046 - RNA, 21 nt, synthetic construct
  source 1..21: mol_type = other RNA
  modified_base 1: mod_base = OTHER; note = 2'-O-methyladenosine-3'-phosphorothioate
  modified_base 2: mod_base = OTHER; note = 2'-O-methylguanosine-3'-phosphorothioate
  modified_base 3: mod_base = OTHER; note = 2'-O-methyluridine-3'-phosphate
  modified_base 4: mod_base = OTHER; note = 2'-O-methylcytidine-3'-phosphate
  modified_base 5: mod_base = OTHER; note = 2'-O-methylcytidine-3'-phosphate
  modified_base 6: mod_base = OTHER; note = 2'-O-hexadecyl-cytidine-3'-phosphate
  modified_base 7: mod_base = OTHER; note = 2'-deoxy-2'-fluoroadenosine-3'-phosphate
  modified_base 8: mod_base = OTHER; note = 2'-O-methyladenosine-3'-phosphate
  modified_base 9: mod_base = OTHER; note = 2'-deoxy-2'-fluorocytidine-3'-phosphate
  modified_base 10: mod_base = OTHER; note = 2'-deoxy-2'-fluorocytidine-3'-phosphate
  modified_base 11: mod_base = OTHER; note = 2'-deoxy-2'-fluoroadenosine-3'-phosphate
  modified_base 12: mod_base = OTHER; note = 2'-O-methyladenosine-3'-phosphate
  modified_base 13: mod_base = OTHER; note = 2'-O-methylcytidine-3'-phosphate
  modified_base 14: mod_base = OTHER; note = 2'-O-methyluridine-3'-phosphate
  modified_base 15: mod_base = OTHER; note = 2'-O-methylguanosine-3'-phosphate
  modified_base 16: mod_base = OTHER; note = 2'-O-methylguanosine-3'-phosphate
  modified_base 17: mod_base = OTHER; note = 2'-O-methyluridine-3'-phosphate
  modified_base 18: mod_base = OTHER; note = 2'-O-methylcytidine-3'-phosphate
  modified_base 19: mod_base = OTHER; note = 2'-O-methyladenosine-3'-phosphorothioate
  modified_base 20: mod_base = OTHER; note = 2'-O-methylcytidine-3'-phosphorothioate
  modified_base 21: mod_base = OTHER; note = 2'-O-methyladenosine
agtcccaaccaactggtcaca

SEQ ID NO: 2047 - RNA, 21 nt, synthetic construct
  source 1..21: mol_type = other RNA
  modified_base 1: mod_base = OTHER; note = 2'-O-methylguanosine-3'-phosphorothioate
  modified_base 2: mod_base = OTHER; note = 2'-O-methylcytidine-3'-phosphorothioate
  modified_base 3: mod_base = OTHER; note = 2'-O-methyladenosine-3'-phosphate
  modified_base 4: mod_base = OTHER; note = 2'-O-methyladenosine-3'-phosphate
  modified_base 5: mod_base = OTHER; note = 2'-O-methylguanosine-3'-phosphate
  modified_base 6: mod_base = OTHER; note = 2'-O-hexadecyl-cytidine-3'-phosphate
  modified_base 7: mod_base = OTHER; note = 2'-deoxy-2'-fluorocytidine-3'-phosphate
  modified_base 8: mod_base = OTHER; note = 2'-O-methylguanosine-3'-phosphate
  modified_base 9: mod_base = OTHER; note = 2'-deoxy-2'-fluoroadenosine-3'-phosphate
  modified_base 10: mod_base = OTHER; note = 2'-deoxy-2'-fluorocytidine-3'-phosphate
  modified_base 11: mod_base = OTHER; note = 2'-deoxy-2'-fluorouridine-3'-phosphate
  modified_base 12: mod_base = OTHER; note = 2'-O-methylcytidine-3'-phosphate
  modified_base 13: mod_base = OTHER; note = 2'-O-methylcytidine-3'-phosphate
  modified_base 14: mod_base = OTHER; note = 2'-O-methyladenosine-3'-phosphate
  modified_base 15: mod_base = OTHER; note = 2'-O-methylguanosine-3'-phosphate
  modified_base 16: mod_base = OTHER; note = 2'-O-methylcytidine-3'-phosphate
  modified_base 17: mod_base = OTHER; note = 2'-O-methyluridine-3'-phosphate
  modified_base 18: mod_base = OTHER; note = 2'-O-methylcytidine-3'-phosphate
  modified_base 19: mod_base = OTHER; note = 2'-O-methylguanosine-3'-phosphorothioate
  modified_base 20: mod_base = OTHER; note = 2'-O-methyluridine-3'-phosphorothioate
  modified_base 21: mod_base = OTHER; note = 2'-O-methyladenosine
gcaagccgactccagctcgta

SEQ ID NO: 2048 - RNA, 21 nt, synthetic construct
  source 1..21: mol_type = other RNA
  modified_base 1: mod_base = OTHER; note = 2'-O-methylcytidine-3'-phosphorothioate
  modified_base 2: mod_base = OTHER; note = 2'-O-methylguanosine-3'-phosphorothioate
  modified_base 3: mod_base = OTHER; note = 2'-O-methyladenosine-3'-phosphate
  modified_base 4: mod_base = OTHER; note = 2'-O-methylcytidine-3'-phosphate
  modified_base 5: mod_base = OTHER; note = 2'-O-methyluridine-3'-phosphate
  modified_base 6: mod_base = OTHER; note = 2'-O-hexadecyl-cytidine-3'-phosphate
  modified_base 7: mod_base = OTHER; note = 2'-deoxy-2'-fluorocytidine-3'-phosphate
  modified_base 8: mod_base = OTHER; note = 2'-O-methyladenosine-3'-phosphate
  modified_base 9: mod_base = OTHER; note = 2'-deoxy-2'-fluoroguanosine-3'-phosphate
  modified_base 10: mod_base = OTHER; note = 2'-deoxy-2'-fluorocytidine-3'-phosphate
  modified_base 11: mod_base = OTHER; note = 2'-deoxy-2'-fluorouridine-3'-phosphate
  modified_base 12: mod_base = OTHER; note = 2'-O-methylcytidine-3'-phosphate
  modified_base 13: mod_base = OTHER; note = 2'-O-methylguanosine-3'-phosphate
  modified_base 14: mod_base = OTHER; note = 2'-O-methyluridine-3'-phosphate
  modified_base 15: mod_base = OTHER; note = 2'-O-methyladenosine-3'-phosphate
  modified_base 16: mod_base = OTHER; note = 2'-O-methyluridine-3'-phosphate
  modified_base 17: mod_base = OTHER; note = 2'-O-methylcytidine-3'-phosphate
  modified_base 18: mod_base = OTHER; note = 2'-O-methyladenosine-3'-phosphate
  modified_base 19: mod_base = OTHER; note = 2'-O-methylguanosine-3'-phosphorothioate
  modified_base 20: mod_base = OTHER; note = 2'-O-methylcytidine-3'-phosphorothioate
  modified_base 21: mod_base = OTHER; note = 2'-O-methyladenosine
cgactccagctcgtatcagca

SEQ ID NO: 2049 - RNA, 21 nt, synthetic construct
  source 1..21: mol_type = other RNA
  modified_base 1: mod_base = OTHER; note = 2'-O-methylcytidine-3'-phosphorothioate
  modified_base 2: mod_base = OTHER; note = 2'-O-methyluridine-3'-phosphorothioate
  modified_base 3: mod_base = OTHER; note = 2'-O-methylcytidine-3'-phosphate
  modified_base 4: mod_base = OTHER; note = 2'-O-methylguanosine-3'-phosphate
  modified_base 5: mod_base = OTHER; note = 2'-O-methyluridine-3'-phosphate
  modified_base 6: mod_base = OTHER; note = 2'-O-hexadecyl-adenosine-3'-phosphate
  modified_base 7: mod_base = OTHER; note = 2'-deoxy-2'-fluorouridine-3'-phosphate
  modified_base 8: mod_base = OTHER; note = 2'-O-methylcytidine-3'-phosphate
  modified_base 9: mod_base = OTHER; note = 2'-deoxy-2'-fluoroadenosine-3'-phosphate
  modified_base 10: mod_base = OTHER; note = 2'-deoxy-2'-fluoroguanosine-3'-phosphate
  modified_base 11: mod_base = OTHER; note = 2'-deoxy-2'-fluorocytidine-3'-phosphate
  modified_base 12: mod_base = OTHER; note = 2'-O-methylcytidine-3'-phosphate
  modified_base 13: mod_base = OTHER; note = 2'-O-methyladenosine-3'-phosphate
  modified_base 14: mod_base = OTHER; note = 2'-O-methyluridine-3'-phosphate
  modified_base 15: mod_base = OTHER; note = 2'-O-methylcytidine-3'-phosphate
  modified_base 16: mod_base = OTHER; note = 2'-O-methyladenosine-3'-phosphate
  modified_base 17: mod_base = OTHER; note = 2'-O-methyladenosine-3'-phosphate
  modified_base 18: mod_base = OTHER; note = 2'-O-methylcytidine-3'-phosphate
  modified_base 19: mod_base = OTHER; note = 2'-O-methylcytidine-3'-phosphorothioate
  modified_base 20: mod_base = OTHER; note = 2'-O-methyluridine-3'-phosphorothioate
  modified_base 21: mod_base = OTHER; note = 2'-O-methyladenosine
ctcgtatcagccatcaaccta

SEQ ID NO: 2050 - RNA, 21 nt, synthetic construct
  source 1..21: mol_type = other RNA
  modified_base 1: mod_base = OTHER; note = 2'-O-methyladenosine-3'-phosphorothioate
  modified_base 2: mod_base = OTHER; note = 2'-O-methylguanosine-3'-phosphorothioate
  modified_base 3: mod_base = OTHER; note = 2'-O-methylcytidine-3'-phosphate
  modified_base 4: mod_base = OTHER; note = 2'-O-methylcytidine-3'-phosphate
  modified_base 5: mod_base = OTHER; note = 2'-O-methyladenosine-3'-phosphate
  modified_base 6: mod_base = OTHER; note = 2'-O-hexadecyl-uridine-3'-phosphate
  modified_base 7: mod_base = OTHER; note = 2'-deoxy-2'-fluorocytidine-3'-phosphate
  modified_base 8: mod_base = OTHER; note = 2'-O-methyladenosine-3'-phosphate
  modified_base 9: mod_base = OTHER; note = 2'-deoxy-2'-fluoroadenosine-3'-phosphate
  modified_base 10: mod_base = OTHER; note = 2'-deoxy-2'-fluorocytidine-3'-phosphate
  modified_base 11: mod_base = OTHER; note = 2'-deoxy-2'-fluorocytidine-3'-phosphate
  modified_base 12: mod_base = OTHER; note = 2'-O-methyluridine-3'-phosphate
  modified_base 13: mod_base = OTHER; note = 2'-O-methylcytidine-3'-phosphate
  modified_base 14: mod_base = OTHER; note = 2'-O-methyluridine-3'-phosphate
  modified_base 15: mod_base = OTHER; note = 2'-O-methylcytidine-3'-phosphate
  modified_base 16: mod_base = OTHER; note = 2'-O-methylcytidine-3'-phosphate
  modified_base 17: mod_base = OTHER; note = 2'-O-methyladenosine-3'-phosphate
  modified_base 18: mod_base = OTHER; note = 2'-O-methylcytidine-3'-phosphate
  modified_base 19: mod_base = OTHER; note = 2'-O-methyluridine-3'-phosphorothioate
  modified_base 20: mod_base = OTHER; note = 2'-O-methylguanosine-3'-phosphorothioate
  modified_base 21: mod_base = OTHER; note = 2'-O-methyladenosine
agccatcaacctctccactga

SEQ ID NO: 2051 - RNA, 21 nt, synthetic construct
  source 1..21: mol_type = other RNA
  modified_base 1: mod_base = OTHER; note = 2'-O-methyluridine-3'-phosphorothioate
  modified_base 2: mod_base = OTHER; note = 2'-O-methylcytidine-3'-phosphorothioate
  modified_base 3: mod_base = OTHER; note = 2'-O-methyladenosine-3'-phosphate
  modified_base 4: mod_base = OTHER; note = 2'-O-methyladenosine-3'-phosphate
  modified_base 5: mod_base = OTHER; note = 2'-O-methylcytidine-3'-phosphate
  modified_base 6: mod_base = OTHER; note = 2'-O-hexadecyl-cytidine-3'-phosphate
  modified_base 7: mod_base = OTHER; note = 2'-deoxy-2'-fluorouridine-3'-phosphate
  modified_base 8: mod_base = OTHER; note = 2'-O-methylcytidine-3'-phosphate
  modified_base 9: mod_base = OTHER; note = 2'-deoxy-2'-fluorouridine-3'-phosphate
  modified_base 10: mod_base = OTHER; note = 2'-deoxy-2'-fluorocytidine-3'-phosphate
  modified_base 11: mod_base = OTHER; note = 2'-deoxy-2'-fluorocytidine-3'-phosphate
  modified_base 12: mod_base = OTHER; note = 2'-O-methyladenosine-3'-phosphate
  modified_base 13: mod_base = OTHER; note = 2'-O-methylcytidine-3'-phosphate
  modified_base 14: mod_base = OTHER; note = 2'-O-methyluridine-3'-phosphate
  modified_base 15: mod_base = OTHER; note = 2'-O-methylguanosine-3'-phosphate
  modified_base 16: mod_base = OTHER; note = 2'-O-methylcytidine-3'-phosphate
  modified_base 17: mod_base = OTHER; note = 2'-O-methylcytidine-3'-phosphate
  modified_base 18: mod_base = OTHER; note = 2'-O-methyladenosine-3'-phosphate
  modified_base 19: mod_base = OTHER; note = 2'-O-methyladenosine-3'-phosphorothioate
  modified_base 20: mod_base = OTHER; note = 2'-O-methylguanosine-3'-phosphorothioate
  modified_base 21: mod_base = OTHER; note = 2'-O-methyladenosine
tcaacctctccactgccaaga

SEQ ID NO: 2052 - RNA, 21 nt, synthetic construct
  source 1..21: mol_type = other RNA
  modified_base 1: mod_base = OTHER; note = 2'-O-methylcytidine-3'-phosphorothioate
  modified_base 2: mod_base = OTHER; note = 2'-O-methyluridine-3'-phosphorothioate
  modified_base 3: mod_base = OTHER; note = 2'-O-methylcytidine-3'-phosphate
  modified_base 4: mod_base = OTHER; note = 2'-O-methyluridine-3'-phosphate
  modified_base 5: mod_base = OTHER; note = 2'-O-methylcytidine-3'-phosphate
  modified_base 6: mod_base = OTHER; note = 2'-O-hexadecyl-cytidine-3'-phosphate
  modified_base 7: mod_base = OTHER; note = 2'-deoxy-2'-fluoroadenosine-3'-phosphate
  modified_base 8: mod_base = OTHER; note = 2'-O-methylcytidine-3'-phosphate
  modified_base 9: mod_base = OTHER; note = 2'-deoxy-2'-fluorouridine-3'-phosphate
  modified_base 10: mod_base = OTHER; note = 2'-deoxy-2'-fluoroguanosine-3'-phosphate
  modified_base 11: mod_base = OTHER; note = 2'-deoxy-2'-fluorocytidine-3'-phosphate
  modified_base 12: mod_base = OTHER; note = 2'-O-methylcytidine-3'-phosphate
  modified_base 13: mod_base = OTHER; note = 2'-O-methyladenosine-3'-phosphate
  modified_base 14: mod_base = OTHER; note = 2'-O-methyladenosine-3'-phosphate
  modified_base 15: mod_base = OTHER; note = 2'-O-methylguanosine-3'-phosphate
  modified_base 16: mod_base = OTHER; note = 2'-O-methylguanosine-3'-phosphate
  modified_base 17: mod_base = OTHER; note = 2'-O-methyladenosine-3'-phosphate
  modified_base 18: mod_base = OTHER; note = 2'-O-methyluridine-3'-phosphate
  modified_base 19: mod_base = OTHER; note = 2'-O-methyluridine-3'-phosphorothioate
  modified_base 20: mod_base = OTHER; note = 2'-O-methylcytidine-3'-phosphorothioate
  modified_base 21: mod_base = OTHER; note = 2'-O-methyladenosine
ctctccactgccaaggattca

SEQ ID NO: 2053 - RNA, 21 nt, synthetic construct
  source 1..21: mol_type = other RNA
  modified_base 1: mod_base = OTHER; note = 2'-O-methyluridine-3'-phosphorothioate
  modified_base 2: mod_base = OTHER; note = 2'-O-methylguanosine-3'-phosphorothioate
  modified_base 3: mod_base = OTHER; note = 2'-O-methylcytidine-3'-phosphate
  modified_base 4: mod_base = OTHER; note = 2'-O-methylcytidine-3'-phosphate
  modified_base 5: mod_base = OTHER; note = 2'-O-methyladenosine-3'-phosphate
  modified_base 6: mod_base = OTHER; note = 2'-O-hexadecyl-adenosine-3'-phosphate
  modified_base 7: mod_base = OTHER; note = 2'-deoxy-2'-fluoroguanosine-3'-phosphate
  modified_base 8: mod_base = OTHER; note = 2'-O-methylguanosine-3'-phosphate
  modified_base 9: mod_base = OTHER; note = 2'-deoxy-2'-fluoroadenosine-3'-phosphate
  modified_base 10: mod_base = OTHER; note = 2'-deoxy-2'-fluorouridine-3'-phosphate
  modified_base 11: mod_base = OTHER; note = 2'-deoxy-2'-fluorouridine-3'-phosphate
  modified_base 12: mod_base = OTHER; note = 2'-O-methylcytidine-3'-phosphate
  modified_base 13: mod_base = OTHER; note = 2'-O-methylcytidine-3'-phosphate
  modified_base 14: mod_base = OTHER; note = 2'-O-methyladenosine-3'-phosphate
  modified_base 15: mod_base = OTHER; note = 2'-O-methyladenosine-3'-phosphate
  modified_base 16: mod_base = OTHER; note = 2'-O-methyladenosine-3'-phosphate
  modified_base 17: mod_base = OTHER; note = 2'-O-methylguanosine-3'-phosphate
  modified_base 18: mod_base = OTHER; note = 2'-O-methylcytidine-3'-phosphate
  modified_base 19: mod_base = OTHER; note = 2'-O-methylcytidine-3'-phosphorothioate
  modified_base 20: mod_base = OTHER; note = 2'-O-methylguanosine-3'-phosphorothioate
  modified_base 21: mod_base = OTHER; note = 2'-O-methyladenosine
tgccaaggattccaaagccga

SEQ ID NO: 2054 - RNA, 21 nt, synthetic construct
  source 1..21: mol_type = other RNA
  modified_base 1: mod_base = OTHER; note = 2'-O-methylguanosine-3'-phosphorothioate
  modified_base 2: mod_base = OTHER; note = 2'-O-methyladenosine-3'-phosphorothioate
  modified_base 3: mod_base = OTHER; note = 2'-O-methyluridine-3'-phosphate
  modified_base 4: mod_base = OTHER; note = 2'-O-methyluridine-3'-phosphate
  modified_base 5: mod_base = OTHER; note = 2'-O-methylcytidine-3'-phosphate
  modified_base 6: mod_base = OTHER; note = 2'-O-hexadecyl-cytidine-3'-phosphate
  modified_base 7: mod_base = OTHER; note = 2'-deoxy-2'-fluoroadenosine-3'-phosphate
  modified_base 8: mod_base = OTHER; note = 2'-O-methyladenosine-3'-phosphate
  modified_base 9: mod_base = OTHER; note = 2'-deoxy-2'-fluoroadenosine-3'-phosphate
  modified_base 10: mod_base = OTHER; note = 2'-deoxy-2'-fluoroguanosine-3'-phosphate
  modified_base 11: mod_base = OTHER; note = 2'-deoxy-2'-fluorocytidine-3'-phosphate
  modified_base 12: mod_base = OTHER; note = 2'-O-methylcytidine-3'-phosphate
  modified_base 13: mod_base = OTHER; note = 2'-O-methylguanosine-3'-phosphate
  modified_base 14: mod_base = OTHER; note = 2'-O-methyluridine-3'-phosphate
  modified_base 15: mod_base = OTHER; note = 2'-O-methylguanosine-3'-phosphate
  modified_base 16: mod_base = OTHER; note = 2'-O-methylguanosine-3'-phosphate
  modified_base 17: mod_base = OTHER; note = 2'-O-methyluridine-3'-phosphate
  modified_base 18: mod_base = OTHER; note = 2'-O-methylcytidine-3'-phosphate
  modified_base 19: mod_base = OTHER; note = 2'-O-methyladenosine-3'-phosphorothioate
  modified_base 20: mod_base = OTHER; note = 2'-O-methylcytidine-3'-phosphorothioate
  modified_base 21: mod_base = OTHER; note = 2'-O-methyladenosine
gattccaaagccgtggtcaca

SEQ ID NO: 2055 - RNA, 21 nt, synthetic construct
  source 1..21: mol_type = other RNA
  modified_base 1: mod_base = OTHER; note = 2'-O-methyladenosine-3'-phosphorothioate
  modified_base 2: mod_base = OTHER; note = 2'-O-methyladenosine-3'-phosphorothioate
  modified_base 3: mod_base = OTHER; note = 2'-O-methyladenosine-3'-phosphate
  modified_base 4: mod_base = OTHER; note = 2'-O-methylguanosine-3'-phosphate
  modified_base 5: mod_base = OTHER; note = 2'-O-methylcytidine-3'-phosphate
  modified_base 6: mod_base = OTHER; note = 2'-O-hexadecyl-cytidine-3'-phosphate
  modified_base 7: mod_base = OTHER; note = 2'-deoxy-2'-fluoroguanosine-3'-phosphate
  modified_base 8: mod_base = OTHER; note = 2'-O-methyluridine-3'-phosphate
  modified_base 9: mod_base = OTHER; note = 2'-deoxy-2'-fluoroguanosine-3'-phosphate
  modified_base 10: mod_base = OTHER; note = 2'-deoxy-2'-fluoroguanosine-3'-phosphate
  modified_base 11: mod_base = OTHER; note = 2'-deoxy-2'-fluorouridine-3'-phosphate
  modified_base 12: mod_base = OTHER; note = 2'-O-methylcytidine-3'-phosphate
  modified_base 13: mod_base = OTHER; note = 2'-O-methyladenosine-3'-phosphate
  modified_base 14: mod_base = OTHER; note = 2'-O-methylcytidine-3'-phosphate
  modified_base 15: mod_base = OTHER; note = 2'-O-methylcytidine-3'-phosphate
  modified_base 16: mod_base = OTHER; note = 2'-O-methyluridine-3'-phosphate
  modified_base 17: mod_base = OTHER; note = 2'-O-methylguanosine-3'-phosphate
  modified_base 18: mod_base = OTHER; note = 2'-O-methyluridine-3'-phosphate
  modified_base 19: mod_base = OTHER; note = 2'-O-methylguanosine-3'-phosphorothioate
  modified_base 20: mod_base = OTHER; note = 2'-O-methyluridine-3'-phosphorothioate
  modified_base 21: mod_base = OTHER; note = 2'-O-methyladenosine
aaagccgtggtcacctgtgta

SEQ ID NO: 2056 - RNA, 21 nt, synthetic construct
  source 1..21: mol_type = other RNA
  modified_base 1: mod_base = OTHER; note = 2'-O-methyluridine-3'-phosphorothioate
  modified_base 2: mod_base = OTHER; note = 2'-O-methylguanosine-3'-phosphorothioate
  modified_base 3: mod_base = OTHER; note = 2'-O-methylguanosine-3'-phosphate
  modified_base 4: mod_base = OTHER; note = 2'-O-methyluridine-3'-phosphate
  modified_base 5: mod_base = OTHER; note = 2'-O-methylcytidine-3'-phosphate
  modified_base 6: mod_base = OTHER; note = 2'-O-hexadecyl-adenosine-3'-phosphate
  modified_base 7: mod_base = OTHER; note = 2'-deoxy-2'-fluorocytidine-3'-phosphate
  modified_base 8: mod_base = OTHER; note = 2'-O-methylcytidine-3'-phosphate
  modified_base 9: mod_base = OTHER; note = 2'-deoxy-2'-fluorouridine-3'-phosphate
  modified_base 10: mod_base = OTHER; note = 2'-deoxy-2'-fluoroguanosine-3'-phosphate
  modified_base 11: mod_base = OTHER; note = 2'-deoxy-2'-fluorouridine-3'-phosphate
  modified_base 12: mod_base = OTHER; note = 2'-O-methylguanosine-3'-phosphate
  modified_base 13: mod_base = OTHER; note = 2'-O-methyluridine-3'-phosphate
  modified_base 14: mod_base = OTHER; note = 2'-O-methylguanosine-3'-phosphate
  modified_base 15: mod_base = OTHER; note = 2'-O-methyladenosine-3'-phosphate
  modified_base 16: mod_base = OTHER; note = 2'-O-methyluridine-3'-phosphate
  modified_base 17: mod_base = OTHER; note = 2'-O-methylcytidine-3'-phosphate
  modified_base 18: mod_base = OTHER; note = 2'-O-methyladenosine-3'-phosphate
  modified_base 19: mod_base = OTHER; note = 2'-O-methyluridine-3'-phosphorothioate
  modified_base 20: mod_base = OTHER; note = 2'-O-methyluridine-3'-phosphorothioate
  modified_base 21: mod_base = OTHER; note = 2'-O-methyladenosine
tggtcacctgtgtgatcatta

SEQ ID NO: 2057 - RNA, 21 nt, synthetic construct
  source 1..21: mol_type = other RNA
  modified_base 1: mod_base = OTHER; note = 2'-O-methyladenosine-3'-phosphorothioate
  modified_base 2: mod_base = OTHER; note = 2'-O-methylcytidine-3'-phosphorothioate
  modified_base 3: mod_base = OTHER; note = 2'-O-methylcytidine-3'-phosphate
  modified_base 4: mod_base = OTHER; note = 2'-O-methyluridine-3'-phosphate
  modified_base 5: mod_base = OTHER; note = 2'-O-methylguanosine-3'-phosphate
  modified_base 6: mod_base = OTHER; note = 2'-O-hexadecyl-uridine-3'-phosphate
  modified_base 7: mod_base = OTHER; note = 2'-deoxy-2'-fluoroguanosine-3'-phosphate
  modified_base 8: mod_base = OTHER; note = 2'-O-methyluridine-3'-phosphate
  modified_base 9: mod_base = OTHER; note = 2'-deoxy-2'-fluoroguanosine-3'-phosphate
  modified_base 10: mod_base = OTHER; note = 2'-deoxy-2'-fluoroadenosine-3'-phosphate
  modified_base 11: mod_base = OTHER; note = 2'-deoxy-2'-fluorouridine-3'-phosphate
  modified_base 12: mod_base = OTHER; note = 2'-O-methylcytidine-3'-phosphate
  modified_base 13: mod_base = OTHER; note = 2'-O-methyladenosine-3'-phosphate
  modified_base 14: mod_base = OTHER; note = 2'-O-methyluridine-3'-phosphate
  modified_base 15: mod_base = OTHER; note = 2'-O-methyluridine-3'-phosphate
  modified_base 16: mod_base = OTHER; note = 2'-O-methylguanosine-3'-phosphate
  modified_base 17: mod_base = OTHER; note = 2'-O-methyluridine-3'-phosphate
  modified_base 18: mod_base = OTHER; note = 2'-O-methylguanosine-3'-phosphate
  modified_base 19: mod_base = OTHER; note = 2'-O-methylcytidine-3'-phosphorothioate
  modified_base 20: mod_base = OTHER; note = 2'-O-methyluridine-3'-phosphorothioate
  modified_base 21: mod_base = OTHER; note = 2'-O-methyladenosine
acctgtgtgatcattgtgcta

SEQ ID NO: 2058 - RNA, 21 nt, synthetic construct
  source 1..21: mol_type = other RNA
  modified_base 1: mod_base = OTHER; note = 2'-O-methylguanosine-3'-phosphorothioate
  modified_base 2: mod_base = OTHER; note = 2'-O-methyluridine-3'-phosphorothioate
  modified_base 3: mod_base = OTHER; note = 2'-O-methylguanosine-3'-phosphate
  modified_base 4: mod_base = OTHER; note = 2'-O-methyladenosine-3'-phosphate
  modified_base 5: mod_base = OTHER; note = 2'-O-methyluridine-3'-phosphate
  modified_base 6: mod_base = OTHER; note = 2'-O-hexadecyl-cytidine-3'-phosphate
  modified_base 7: mod_base = OTHER; note = 2'-deoxy-2'-fluoroadenosine-3'-phosphate
  modified_base 8: mod_base = OTHER; note = 2'-O-methyluridine-3'-phosphate
  modified_base 9: mod_base = OTHER; note = 2'-deoxy-2'-fluorouridine-3'-phosphate
  modified_base 10: mod_base = OTHER; note = 2'-deoxy-2'-fluoroguanosine-3'-phosphate
  modified_base 11: mod_base = OTHER; note = 2'-deoxy-2'-fluorouridine-3'-phosphate
  modified_base 12: mod_base = OTHER; note = 2'-O-methylguanosine-3'-phosphate
  modified_base 13: mod_base = OTHER; note = 2'-O-methylcytidine-3'-phosphate
  modified_base 14: mod_base = OTHER; note = 2'-O-methyluridine-3'-phosphate
  modified_base 15: mod_base = OTHER; note = 2'-O-methylguanosine-3'-phosphate
  modified_base 16: mod_base = OTHER; note = 2'-O-methyluridine-3'-phosphate
  modified_base 17: mod_base = OTHER; note = 2'-O-methylcytidine-3'-phosphate
  modified_base 18: mod_base = OTHER; note = 2'-O-methyladenosine-3'-phosphate
  modified_base 19: mod_base = OTHER; note = 2'-O-methylguanosine-3'-phosphorothioate
  modified_base 20: mod_base = OTHER; note = 2'-O-methyluridine-3'-phosphorothioate
  modified_base 21: mod_base = OTHER; note = 2'-O-methyladenosine
gtgatcattgtgctgtcagta

SEQ ID NO: 2059 - RNA, 21 nt, synthetic construct
  source 1..21: mol_type = other RNA
  modified_base 1: mod_base = OTHER; note = 2'-O-methylguanosine-3'-phosphorothioate
  modified_base 2: mod_base = OTHER; note = 2'-O-methyluridine-3'-phosphorothioate
  modified_base 3: mod_base = OTHER; note = 2'-O-methylguanosine-3'-phosphate
  modified_base 4: mod_base = OTHER; note = 2'-O-methylcytidine-3'-phosphate
  modified_base 5: mod_base = OTHER; note = 2'-O-methyluridine-3'-phosphate
  modified_base 6: mod_base = OTHER; note = 2'-O-hexadecyl-guanosine-3'-phosphate
  modified_base 7: mod_base = OTHER; note = 2'-deoxy-2'-fluorouridine-3'-phosphate
  modified_base 8: mod_base = OTHER; note = 2'-O-methylcytidine-3'-phosphate
  modified_base 9: mod_base = OTHER; note = 2'-deoxy-2'-fluoroadenosine-3'-phosphate
  modified_base 10: mod_base = OTHER; note = 2'-deoxy-2'-fluoroguanosine-3'-phosphate
  modified_base 11: mod_base = OTHER; note = 2'-deoxy-2'-fluorouridine-3'-phosphate
  modified_base 12: mod_base = OTHER; note = 2'-O-methylcytidine-3'-phosphate
  modified_base 13: mod_base = OTHER; note = 2'-O-methylcytidine-3'-phosphate
  modified_base 14: mod_base = OTHER; note = 2'-O-methyluridine-3'-phosphate
  modified_base 15: mod_base = OTHER; note = 2'-O-methylguanosine-3'-phosphate
  modified_base 16: mod_base = OTHER; note = 2'-O-methylguanosine-3'-phosphate
  modified_base 17: mod_base = OTHER; note = 2'-O-methyluridine-3'-phosphate
  modified_base 18: mod_base = OTHER; note = 2'-O-methylguanosine-3'-phosphate
  modified_base 19: mod_base = OTHER; note = 2'-O-methyluridine-3'-phosphorothioate
  modified_base 20: mod_base = OTHER; note = 2'-O-methylguanosine-3'-phosphorothioate
  modified_base 21: mod_base = OTHER; note = 2'-O-methyladenosine
gtgctgtcagtcctggtgtga

SEQ ID NO: 2060 - RNA, 21 nt, synthetic construct
  source 1..21: mol_type = other RNA
  modified_base 1: mod_base = OTHER; note = 2'-O-methyluridine-3'-phosphorothioate
  modified_base 2: mod_base = OTHER; note = 2'-O-methylcytidine-3'-phosphorothioate
  modified_base 3: mod_base = OTHER; note = 2'-O-methyladenosine-3'-phosphate
  modified_base 4: mod_base = OTHER; note = 2'-O-methylguanosine-3'-phosphate
  modified_base 5: mod_base = OTHER; note = 2'-O-methyluridine-3'-phosphate
  modified_base 6: mod_base = OTHER; note = 2'-O-hexadecyl-cytidine-3'-phosphate
  modified_base 7: mod_base = OTHER; note = 2'-deoxy-2'-fluorocytidine-3'-phosphate
  modified_base 8: mod_base = OTHER; note = 2'-O-methyluridine-3'-phosphate
  modified_base 9: mod_base = OTHER; note = 2'-deoxy-2'-fluoroguanosine-3'-phosphate
  modified_base 10: mod_base = OTHER; note = 2'-deoxy-2'-fluoroguanosine-3'-phosphate
  modified_base 11: mod_base = OTHER; note = 2'-deoxy-2'-fluorouridine-3'-phosphate
  modified_base 12: mod_base = OTHER; note = 2'-O-methylguanosine-3'-phosphate
  modified_base 13: mod_base = OTHER; note = 2'-O-methyluridine-3'-phosphate
  modified_base 14: mod_base = OTHER; note = 2'-O-methylguanosine-3'-phosphate
  modified_base 15: mod_base = OTHER; note = 2'-O-methylcytidine-3'-phosphate
  modified_base 16: mod_base = OTHER; note = 2'-O-methyluridine-3'-phosphate
  modified_base 17: mod_base = OTHER; note = 2'-O-methylguanosine-3'-phosphate
  modified_base 18: mod_base = OTHER; note = 2'-O-methyluridine-3'-phosphate
  modified_base 19: mod_base = OTHER; note = 2'-O-methylcytidine-3'-phosphorothioate
  modified_base 20: mod_base = OTHER; note = 2'-O-methyluridine-3'-phosphorothioate
  modified_base 21: mod_base = OTHER; note = 2'-O-methyladenosine
tcagtcctggtgtgctgtcta

SEQ ID NO: 2061 - RNA, 21 nt, synthetic construct
  source 1..21: mol_type = other RNA
  modified_base 1: mod_base = OTHER; note = 2'-O-methylcytidine-3'-phosphorothioate
  modified_base 2: mod_base = OTHER; note = 2'-O-methyluridine-3'-phosphorothioate
  modified_base 3: mod_base = OTHER; note = 2'-O-methylguanosine-3'-phosphate
  modified_base 4: mod_base = OTHER; note = 2'-O-methylguanosine-3'-phosphate
  modified_base 5: mod_base = OTHER; note = 2'-O-methyluridine-3'-phosphate
  modified_base 6: mod_base = OTHER; note = 2'-O-hexadecyl-guanosine-3'-phosphate
  modified_base 7: mod_base = OTHER; note = 2'-deoxy-2'-fluorouridine-3'-phosphate
  modified_base 8: mod_base = OTHER; note = 2'-O-methylguanosine-3'-phosphate
  modified_base 9: mod_base = OTHER; note = 2'-deoxy-2'-fluorocytidine-3'-phosphate
  modified_base 10: mod_base = OTHER; note = 2'-deoxy-2'-fluorouridine-3'-phosphate
  modified_base 11: mod_base = OTHER; note = 2'-deoxy-2'-fluoroguanosine-3'-phosphate
  modified_base 12: mod_base = OTHER; note = 2'-O-methyluridine-3'-phosphate
  modified_base 13: mod_base = OTHER; note = 2'-O-methylcytidine-3'-phosphate
  modified_base 14: mod_base = OTHER; note = 2'-O-methyluridine-3'-phosphate
  modified_base 15: mod_base = OTHER; note = 2'-O-methyluridine-3'-phosphate
  modified_base 16: mod_base = OTHER; note = 2'-O-methylcytidine-3'-phosphate
  modified_base 17: mod_base = OTHER; note = 2'-O-methylcytidine-3'-phosphate
  modified_base 18: mod_base = OTHER; note = 2'-O-methyladenosine-3'-phosphate
  modified_base 19: mod_base = OTHER; note = 2'-O-methylcytidine-3'-phosphorothioate
  modified_base 20: mod_base = OTHER; note = 2'-O-methyluridine-3'-phosphorothioate
  modified_base 21: mod_base = OTHER; note = 2'-O-methyladenosine
ctggtgtgctgtcttccacta

SEQ ID NO: 2062 - RNA, 21 nt, synthetic construct
  source 1..21: mol_type = other RNA
  modified_base 1: mod_base = OTHER; note = 2'-O-methyluridine-3'-phosphorothioate
  modified_base 2: mod_base = OTHER; note = 2'-O-methyluridine-3'-phosphorothioate
  modified_base 3: mod_base = OTHER; note = 2'-O-methyluridine-3'-phosphate
  modified_base 4: mod_base = OTHER; note = 2'-O-methylcytidine-3'-phosphate
  modified_base 5: mod_base = OTHER; note = 2'-O-methylcytidine-3'-phosphate
  modified_base 6: mod_base = OTHER; note = 2'-O-hexadecyl-uridine-3'-phosphate
  modified_base 7: mod_base = OTHER; note = 2'-deoxy-2'-fluorouridine-3'-phosphate
  modified_base 8: mod_base = OTHER; note = 2'-O-methylguanosine-3'-phosphate
  modified_base 9: mod_base = OTHER; note = 2'-deoxy-2'-fluoroguanosine-3'-phosphate
  modified_base 10: mod_base = OTHER; note = 2'-deoxy-2'-fluorouridine-3'-phosphate
  modified_base 11: mod_base = OTHER; note = 2'-deoxy-2'-fluoroadenosine-3'-phosphate
  modified_base 12: mod_base = OTHER; note = 2'-O-methylcytidine-3'-phosphate
  modified_base 13: mod_base = OTHER; note = 2'-O-methyladenosine-3'-phosphate
  modified_base 14: mod_base = OTHER; note = 2'-O-methylguanosine-3'-phosphate
  modified_base 15: mod_base = OTHER; note = 2'-O-methylguanosine-3'-phosphate
  modified_base 16: mod_base = OTHER; note = 2'-O-methyluridine-3'-phosphate
  modified_base 17: mod_base = OTHER; note = 2'-O-methylguanosine-3'-phosphate
  modified_base 18: mod_base = OTHER; note = 2'-O-methylguanosine-3'-phosphate
  modified_base 19: mod_base = OTHER; note = 2'-O-methyluridine-3'-phosphorothioate
  modified_base 20: mod_base = OTHER; note = 2'-O-methyluridine-3'-phosphorothioate
  modified_base 21: mod_base = OTHER; note = 2'-O-methyladenosine
tttccttggtacaggtggtta

SEQ ID NO: 2063 - RNA, 21 nt, synthetic construct
  source 1..21: mol_type = other RNA
  modified_base 1: mod_base = OTHER; note = 2'-O-methyluridine-3'-phosphorothioate
  modified_base 2: mod_base = OTHER; note = 2'-O-methyluridine-3'-phosphorothioate
  modified_base 3: mod_base = OTHER; note = 2'-O-methylguanosine-3'-phosphate
  modified_base 4: mod_base = OTHER; note = 2'-O-methylguanosine-3'-phosphate
  modified_base 5: mod_base = OTHER; note = 2'-O-methyluridine-3'-phosphate
  modified_base 6: mod_base = OTHER; note = 2'-O-hexadecyl-adenosine-3'-phosphate
  modified_base 7: mod_base = OTHER; note = 2'-deoxy-2'-fluorocytidine-3'-phosphate
  modified_base 8: mod_base = OTHER; note = 2'-O-methyladenosine-3'-phosphate
  modified_base 9: mod_base = OTHER; note = 2'-deoxy-2'-fluoroguanosine-3'-phosphate
  modified_base 10: mod_base = OTHER; note = 2'-deoxy-2'-fluoroguanosine-3'-phosphate
  modified_base 11: mod_base = OTHER; note = 2'-deoxy-2'-fluorouridine-3'-phosphate
  modified_base 12: mod_base = OTHER; note = 2'-O-methylguanosine-3'-phosphate
  modified_base 13: mod_base = OTHER; note = 2'-O-methylguanosine-3'-phosphate
  modified_base 14: mod_base = OTHER; note = 2'-O-methyluridine-3'-phosphate
  modified_base 15: mod_base = OTHER; note = 2'-O-methyluridine-3'-phosphate
  modified_base 16: mod_base = OTHER; note = 2'-O-methylcytidine-3'-phosphate
  modified_base 17: mod_base = OTHER; note = 2'-O-methyluridine-3'-phosphate
  modified_base 18: mod_base = OTHER; note = 2'-O-methylcytidine-3'-phosphate
  modified_base 19: mod_base = OTHER; note = 2'-O-methyluridine-3'-phosphorothioate
  modified_base 20: mod_base = OTHER; note = 2'-O-methylcytidine-3'-phosphorothioate
  modified_base 21: mod_base = OTHER; note = 2'-O-methyladenosine
ttggtacaggtggttctctca

SEQ ID NO: 2064 - RNA, 21 nt, synthetic construct
  source 1..21: mol_type = other RNA
  modified_base 1: mod_base = OTHER; note = 2'-O-methylguanosine-3'-phosphorothioate
  modified_base 2: mod_base = OTHER; note = 2'-O-methyluridine-3'-phosphorothioate
  modified_base 3: mod_base = OTHER; note = 2'-O-methylguanosine-3'-phosphate
  modified_base 4: mod_base = OTHER; note = 2'-O-methylguanosine-3'-phosphate
  modified_base 5: mod_base = OTHER; note = 2'-O-methyluridine-3'-phosphate
  modified_base 6: mod_base = OTHER; note = 2'-O-hexadecyl-uridine-3'-phosphate
  modified_base 7: mod_base = OTHER; note = 2'-deoxy-2'-fluorocytidine-3'-phosphate
  modified_base 8: mod_base = OTHER; note = 2'-O-methyluridine-3'-phosphate
  modified_base 9: mod_base = OTHER; note = 2'-deoxy-2'-fluorocytidine-3'-phosphate
  modified_base 10: mod_base = OTHER; note = 2'-deoxy-2'-fluorouridine-3'-phosphate
  modified_base 11: mod_base = OTHER; note = 2'-deoxy-2'-fluorocytidine-3'-phosphate
  modified_base 12: mod_base = OTHER; note = 2'-O-methylcytidine-3'-phosphate
  modified_base 13: mod_base = OTHER; note = 2'-O-methyladenosine-3'-phosphate
  modified_base 14: mod_base = OTHER; note = 2'-O-methylguanosine-3'-phosphate
  modified_base 15: mod_base = OTHER; note = 2'-O-methylcytidine-3'-phosphate
  modified_base 16: mod_base = OTHER; note = 2'-O-methyladenosine-3'-phosphate
  modified_base 17: mod_base = OTHER; note = 2'-O-methyladenosine-3'-phosphate
  modified_base 18: mod_base = OTHER; note = 2'-O-methyluridine-3'-phosphate
  modified_base 19: mod_base = OTHER; note = 2'-O-methylguanosine-3'-phosphorothioate
  modified_base 20: mod_base = OTHER; note = 2'-O-methylguanosine-3'-phosphorothioate
  modified_base 21: mod_base = OTHER; note = 2'-O-methyladenosine
gtggttctctccagcaatgga

SEQ ID NO: 2065 - RNA, 21 nt, synthetic construct
  source 1..21: mol_type = other RNA
  modified_base 1: mod_base = OTHER; note = 2'-O-methyluridine-3'-phosphorothioate
  modified_base 2: mod_base = OTHER; note = 2'-O-methylcytidine-3'-phosphorothioate
  modified_base 3: mod_base = OTHER; note = 2'-O-methyluridine-3'-phosphate
  modified_base 4: mod_base = OTHER; note = 2'-O-methylcytidine-3'-phosphate
  modified_base 5: mod_base = OTHER; note = 2'-O-methylcytidine-3'-phosphate
  modified_base 6: mod_base = OTHER; note = 2'-O-hexadecyl-adenosine-3'-phosphate
  modified_base 7: mod_base = OTHER; note = 2'-deoxy-2'-fluoroguanosine-3'-phosphate
  modified_base 8: mod_base = OTHER; note = 2'-O-methylcytidine-3'-phosphate
  modified_base 9: mod_base = OTHER; note = 2'-deoxy-2'-fluoroadenosine-3'-phosphate
  modified_base 10: mod_base = OTHER; note = 2'-deoxy-2'-fluoroadenosine-3'-phosphate
  modified_base 11: mod_base = OTHER; note = 2'-deoxy-2'-fluorouridine-3'-phosphate
  modified_base 12: mod_base = OTHER; note = 2'-O-methylguanosine-3'-phosphate
  modified_base 13: mod_base = OTHER; note = 2'-O-methylguanosine-3'-phosphate
  modified_base 14: mod_base = OTHER; note = 2'-O-methylguanosine-3'-phosphate
  modified_base 15: mod_base = OTHER; note = 2'-O-methyladenosine-3'-phosphate
  modified_base 16: mod_base = OTHER; note = 2'-O-methylguanosine-3'-phosphate
  modified_base 17: mod_base = OTHER; note = 2'-O-methylcytidine-3'-phosphate
  modified_base 18: mod_base = OTHER; note = 2'-O-methyluridine-3'-phosphate
  modified_base 19: mod_base = OTHER; note = 2'-O-methyluridine-3'-phosphorothioate
  modified_base 20: mod_base = OTHER; note = 2'-O-methylcytidine-3'-phosphorothioate
  modified_base 21: mod_base = OTHER; note = 2'-O-methyladenosine
tctccagcaatgggagcttca

SEQ ID NO: 2066 - RNA, 21 nt, synthetic construct
  source 1..21: mol_type = other RNA
  modified_base 1: mod_base = OTHER; note = 2'-O-methyladenosine-3'-phosphorothioate
  modified_base 2: mod_base = OTHER; note = 2'-O-methyladenosine-3'-phosphorothioate
  modified_base 3: mod_base = OTHER; note = 2'-O-methyluridine-3'-phosphate
  modified_base 4: mod_base = OTHER; note = 2'-O-methylguanosine-3'-phosphate
  modified_base 5: mod_base = OTHER; note = 2'-O-methylguanosine-3'-phosphate
  modified_base 6: mod_base = OTHER; note = 2'-O-hexadecyl-guanosine-3'-phosphate
  modified_base 7: mod_base = OTHER; note = 2'-deoxy-2'-fluoroadenosine-3'-phosphate
  modified_base 8: mod_base = OTHER; note = 2'-O-methylguanosine-3'-phosphate
  modified_base 9: mod_base = OTHER; note = 2'-deoxy-2'-fluorocytidine-3'-phosphate
  modified_base 10: mod_base = OTHER; note = 2'-deoxy-2'-fluorouridine-3'-phosphate
  modified_base 11: mod_base = OTHER; note = 2'-deoxy-2'-fluorouridine-3'-phosphate
  modified_base 12: mod_base = OTHER; note = 2'-O-methylcytidine-3'-phosphate
  modified_base 13: mod_base = OTHER; note = 2'-O-methyladenosine-3'-phosphate
  modified_base 14: mod_base = OTHER; note = 2'-O-methyluridine-3'-phosphate
  modified_base 15: mod_base = OTHER; note = 2'-O-methyluridine-3'-phosphate
  modified_base 16: mod_base = OTHER; note = 2'-O-methylcytidine-3'-phosphate
  modified_base 17: mod_base = OTHER; note = 2'-O-methyluridine-3'-phosphate
  modified_base 18: mod_base = OTHER; note = 2'-O-methyluridine-3'-phosphate
  modified_base 19: mod_base = OTHER; note = 2'-O-methyluridine-3'-phosphorothioate
  modified_base 20: mod_base = OTHER; note = 2'-O-methyladenosine-3'-phosphorothioate
  modified_base 21: mod_base = OTHER; note = 2'-O-methyladenosine
aatgggagcttcattctttaa

SEQ ID NO: 2067 - RNA, 21 nt, synthetic construct
  source 1..21: mol_type = other RNA
  modified_base 1: mod_base = OTHER; note = 2'-O-methyluridine-3'-phosphorothioate
  modified_base 2: mod_base = OTHER; note = 2'-O-methyluridine-3'-phosphorothioate
  modified_base 3: mod_base = OTHER; note = 2'-O-methylcytidine-3'-phosphate
  modified_base 4: mod_base = OTHER; note = 2'-O-methyladenosine-3'-phosphate
  modified_base 5: mod_base = OTHER; note = 2'-O-methyluridine-3'-phosphate
  modified_base 6: mod_base = OTHER; note = 2'-O-hexadecyl-uridine-3'-phosphate
  modified_base 7: mod_base = OTHER; note = 2'-deoxy-2'-fluorocytidine-3'-phosphate
  modified_base 8: mod_base = OTHER; note = 2'-O-methyluridine-3'-phosphate
  modified_base 9: mod_base = OTHER; note = 2'-deoxy-2'-fluorouridine-3'-phosphate
  modified_base 10: mod_base = OTHER; note = 2'-deoxy-2'-fluorouridine-3'-phosphate
  modified_base 11: mod_base = OTHER; note = 2'-deoxy-2'-fluoroadenosine-3'-phosphate
  modified_base 12: mod_base = OTHER; note = 2'-O-methylcytidine-3'-phosphate
  modified_base 13: mod_base = OTHER; note = 2'-O-methylcytidine-3'-phosphate
  modified_base 14: mod_base = OTHER; note = 2'-O-methyladenosine-3'-phosphate
  modified_base 15: mod_base = OTHER; note = 2'-O-methylguanosine-3'-phosphate
  modified_base 16: mod_base = OTHER; note = 2'-O-methyluridine-3'-phosphate
  modified_base 17: mod_base = OTHER; note = 2'-O-methyluridine-3'-phosphate
  modified_base 18: mod_base = OTHER; note = 2'-O-methyluridine-3'-phosphate
  modified_base 19: mod_base = OTHER; note = 2'-O-methylguanosine-3'-phosphorothioate
  modified_base 20: mod_base = OTHER; note = 2'-O-methyladenosine-3'-phosphorothioate
  modified_base 21: mod_base = OTHER; note = 2'-O-methyladenosine
ttcattctttaccagtttgaa

SEQ ID NO: 2068 - RNA, 21 nt, synthetic construct
  source 1..21: mol_type = other RNA
  modified_base 1: mod_base = OTHER; note = 2'-O-methylcytidine-3'-phosphorothioate
  modified_base 2: mod_base = OTHER; note = 2'-O-methyluridine-3'-phosphorothioate
  modified_base 3: mod_base = OTHER; note = 2'-O-methyluridine-3'-phosphate
  modified_base 4: mod_base = OTHER; note = 2'-O-methyluridine-3'-phosphate
  modified_base 5: mod_base = OTHER; note = 2'-O-methyladenosine-3'-phosphate
  modified_base 6: mod_base = OTHER; note = 2'-O-hexadecyl-cytidine-3'-phosphate
  modified_base 7: mod_base = OTHER; note = 2'-deoxy-2'-fluorocytidine-3'-phosphate
  modified_base 8: mod_base = OTHER; note = 2'-O-methyladenosine-3'-phosphate
  modified_base 9: mod_base = OTHER; note = 2'-deoxy-2'-fluoroguanosine-3'-phosphate
  modified_base 10: mod_base = OTHER; note = 2'-deoxy-2'-fluorouridine-3'-phosphate
  modified_base 11: mod_base = OTHER; note = 2'-deoxy-2'-fluorouridine-3'-phosphate
  modified_base 12: mod_base = OTHER; note = 2'-O-methyluridine-3'-phosphate
  modified_base 13: mod_base = OTHER; note = 2'-O-methylguanosine-3'-phosphate
  modified_base 14: mod_base = OTHER; note = 2'-O-methyladenosine-3'-phosphate
  modified_base 15: mod_base = OTHER; note = 2'-O-methyladenosine-3'-phosphate
  modified_base 16: mod_base = OTHER; note = 2'-O-methyluridine-3'-phosphate
  modified_base 17: mod_base = OTHER; note = 2'-O-methyluridine-3'-phosphate
  modified_base 18: mod_base = OTHER; note = 2'-O-methylguanosine-3'-phosphate
  modified_base 19: mod_base = OTHER; note = 2'-O-methyluridine-3'-phosphorothioate
  modified_base 20: mod_base = OTHER; note = 2'-O-methyluridine-3'-phosphorothioate
  modified_base 21: mod_base = OTHER; note = 2'-O-methyladenosine
ctttaccagtttgaattgtta

SEQ ID NO: 2069 - RNA, 21 nt, synthetic construct
  source 1..21: mol_type = other RNA
  modified_base 1: mod_base = OTHER; note = 2'-O-methylcytidine-3'-phosphorothioate
  modified_base 2: mod_base = OTHER; note = 2'-O-methyladenosine-3'-phosphorothioate
  modified_base 3: mod_base = OTHER; note = 2'-O-methylguanosine-3'-phosphate
  modified_base 4: mod_base = OTHER; note = 2'-O-methyluridine-3'-phosphate
  modified_base 5: mod_base = OTHER; note = 2'-O-methyluridine-3'-phosphate
  modified_base 6: mod_base = OTHER; note = 2'-O-hexadecyl-uridine-3'-phosphate
  modified_base 7: mod_base = OTHER; note = 2'-deoxy-2'-fluoroguanosine-3'-phosphate
  modified_base 8: mod_base = OTHER; note = 2'-O-methyladenosine-3'-phosphate
  modified_base 9: mod_base = OTHER; note = 2'-deoxy-2'-fluoroadenosine-3'-phosphate
  modified_base 10: mod_base = OTHER; note = 2'-deoxy-2'-fluorouridine-3'-phosphate
  modified_base 11: mod_base = OTHER; note = 2'-deoxy-2'-fluorouridine-3'-phosphate
  modified_base 12: mod_base = OTHER; note = 2'-O-methylguanosine-3'-phosphate
  modified_base 13: mod_base = OTHER; note = 2'-O-methyluridine-3'-phosphate
  modified_base 14: mod_base = OTHER; note = 2'-O-methyluridine-3'-phosphate
  modified_base 15: mod_base = OTHER; note = 2'-O-methyluridine-3'-phosphate
  modified_base 16: mod_base = OTHER; note = 2'-O-methylguanosine-3'-phosphate
  modified_base 17: mod_base = OTHER; note = 2'-O-methylguanosine-3'-phosphate
  modified_base 18: mod_base = OTHER; note = 2'-O-methyladenosine-3'-phosphate
  modified_base 19: mod_base = OTHER; note = 2'-O-methyluridine-3'-phosphorothioate
  modified_base 20: mod_base = OTHER; note = 2'-O-methyluridine-3'-phosphorothioate
  modified_base 21: mod_base = OTHER; note = 2'-O-methyladenosine
cagtttgaattgtttggatta

SEQ ID NO: 2070 - RNA, 21 nt, synthetic construct
  source 1..21: mol_type = other RNA
  modified_base 1: mod_base = OTHER; note = 2'-O-methyladenosine-3'-phosphorothioate
  modified_base 2: mod_base = OTHER; note = 2'-O-methyladenosine-3'-phosphorothioate
  modified_base 3: mod_base = OTHER; note = 2'-O-methyluridine-3'-phosphate
  modified_base 4: mod_base = OTHER; note = 2'-O-methyluridine-3'-phosphate
  modified_base 5: mod_base = OTHER; note = 2'-O-methylguanosine-3'-phosphate
  modified_base 6: mod_base = OTHER; note = 2'-O-hexadecyl-uridine-3'-phosphate
  modified_base 7: mod_base = OTHER; note = 2'-deoxy-2'-fluorouridine-3'-phosphate
  modified_base 8: mod_base = OTHER; note = 2'-O-methyluridine-3'-phosphate
  modified_base 9: mod_base = OTHER; note = 2'-deoxy-2'-fluoroguanosine-3'-phosphate
  modified_base 10: mod_base = OTHER; note = 2'-deoxy-2'-fluoroguanosine-3'-phosphate
  modified_base 11: mod_base = OTHER; note = 2'-deoxy-2'-fluoroadenosine-3'-phosphate
  modified_base 12: mod_base = OTHER; note = 2'-O-methyluridine-3'-phosphate
  modified_base 13: mod_base = OTHER; note = 2'-O-methyluridine-3'-phosphate
  modified_base 14: mod_base = OTHER; note = 2'-O-methyluridine-3'-phosphate
  modified_base 15: mod_base = OTHER; note = 2'-O-methyladenosine-3'-phosphate
  modified_base 16: mod_base = OTHER; note = 2'-O-methylcytidine-3'-phosphate
  modified_base 17: mod_base = OTHER; note = 2'-O-methyluridine-3'-phosphate
  modified_base 18: mod_base = OTHER; note = 2'-O-methylcytidine-3'-phosphate
  modified_base 19: mod_base = OTHER; note = 2'-O-methyluridine-3'-phosphorothioate
  modified_base 20: mod_base = OTHER; note = 2'-O-methyluridine-3'-phosphorothioate
  modified_base 21: mod_base = OTHER; note = 2'-O-methyladenosine
aattgtttggatttactctta

SEQ ID NO: 2071 - RNA, 21 nt, synthetic construct
  source 1..21: mol_type = other RNA
  modified_base 1: mod_base = OTHER; note = 2'-O-methyluridine-3'-phosphorothioate
  modified_base 2: mod_base = OTHER; note = 2'-O-methylcytidine-3'-phosphorothioate
  modified_base 3: mod_base = OTHER; note = 2'-O-methyluridine-3'-phosphate
  modified_base 4: mod_base = OTHER; note = 2'-O-methyluridine-3'-phosphate
  modified_base 5: mod_base = OTHER; note = 2'-O-methyladenosine-3'-phosphate
  modified_base 6: mod_base = OTHER; note = 2'-O-hexadecyl-uridine-3'-phosphate
  modified_base 7: mod_base = OTHER; note = 2'-deoxy-2'-fluoroadenosine-3'-phosphate
  modified_base 8: mod_base = OTHER; note = 2'-O-methyluridine-3'-phosphate
  modified_base 9: mod_base = OTHER; note = 2'-deoxy-2'-fluorouridine-3'-phosphate
  modified_base 10: mod_base = OTHER; note = 2'-deoxy-2'-fluorouridine-3'-phosphate
  modified_base 11: mod_base = OTHER; note = 2'-deoxy-2'-fluorouridine-3'-phosphate
  modified_base 12: mod_base = OTHER; note = 2'-O-methyluridine-3'-phosphate
  modified_base 13: mod_base = OTHER; note = 2'-O-methylcytidine-3'-phosphate
  modified_base 14: mod_base = OTHER; note = 2'-O-methyladenosine-3'-phosphate
  modified_base 15: mod_base = OTHER; note = 2'-O-methyladenosine-3'-phosphate
  modified_base 16: mod_base = OTHER; note = 2'-O-methylguanosine-3'-phosphate
  modified_base 17: mod_base = OTHER; note = 2'-O-methyluridine-3'-phosphate
  modified_base 18: mod_base = OTHER; note = 2'-O-methylcytidine-3'-phosphate
  modified_base 19: mod_base = OTHER; note = 2'-O-methyladenosine-3'-phosphorothioate
  modified_base 20: mod_base = OTHER; note = 2'-O-methylguanosine-3'-phosphorothioate
  modified_base 21: mod_base = OTHER; note = 2'-O-methyladenosine
tcttatatttttcaagtcaga

SEQ ID NO: 2072 - RNA, 21 nt, synthetic construct
  source 1..21: mol_type = other RNA
  modified_base 1: mod_base = OTHER; note = 2'-O-methyluridine-3'-phosphorothioate
  modified_base 2: mod_base = OTHER; note = 2'-O-methyluridine-3'-phosphorothioate
  modified_base 3: mod_base = OTHER; note = 2'-O-methyluridine-3'-phosphate
  modified_base 4: mod_base = OTHER; note = 2'-O-methylcytidine-3'-phosphate
  modified_base 5: mod_base = OTHER; note = 2'-O-methyladenosine-3'-phosphate
  modified_base 6: mod_base = OTHER; note = 2'-O-hexadecyl-adenosine-3'-phosphate
  modified_base 7: mod_base = OTHER; note = 2'-deoxy-2'-fluoroguanosine-3'-phosphate
  modified_base 8: mod_base = OTHER; note = 2'-O-methyluridine-3'-phosphate
  modified_base 9: mod_base = OTHER; note = 2'-deoxy-2'-fluorocytidine-3'-phosphate
  modified_base 10: mod_base = OTHER; note = 2'-deoxy-2'-fluoroadenosine-3'-phosphate
  modified_base 11: mod_base = OTHER; note = 2'-deoxy-2'-fluoroguanosine-3'-phosphate
  modified_base 12: mod_base = OTHER; note = 2'-O-methylguanosine-3'-phosphate
  modified_base 13: mod_base = OTHER; note = 2'-O-methyladenosine-3'-phosphate
  modified_base 14: mod_base = OTHER; note = 2'-O-methyluridine-3'-phosphate
  modified_base 15: mod_base = OTHER; note = 2'-O-methyluridine-3'-phosphate
  modified_base 16: mod_base = OTHER; note = 2'-O-methyladenosine-3'-phosphate
  modified_base 17: mod_base = OTHER; note = 2'-O-methyladenosine-3'-phosphate
  modified_base 18: mod_base = OTHER; note = 2'-O-methyladenosine-3'-phosphate
  modified_base 19: mod_base = OTHER; note = 2'-O-methylcytidine-3'-phosphorothioate
  modified_base 20: mod_base = OTHER; note = 2'-O-methylcytidine-3'-phosphorothioate
  modified_base 21: mod_base = OTHER; note = 2'-O-methyladenosine
tttcaagtcaggattaaacca

SEQ ID NO: 2073 - RNA, 21 nt, synthetic construct
  source 1..21: mol_type = other RNA
  modified_base 1: mod_base = OTHER; note = 2'-O-methylguanosine-3'-phosphorothioate
  modified_base 2: mod_base = OTHER; note = 2'-O-methyluridine-3'-phosphorothioate
  modified_base 3: mod_base = OTHER; note = 2'-O-methylcytidine-3'-phosphate
  modified_base 4: mod_base = OTHER; note = 2'-O-methyladenosine-3'-phosphate
  modified_base 5: mod_base = OTHER; note = 2'-O-methylguanosine-3'-phosphate
  modified_base 6: mod_base = OTHER; note = 2'-O-hexadecyl-guanosine-3'-phosphate
  modified_base 7: mod_base = OTHER; note = 2'-deoxy-2'-fluoroadenosine-3'-phosphate
  modified_base 8: mod_base = OTHER; note = 2'-O-methyluridine-3'-phosphate
  modified_base 9: mod_base = OTHER; note = 2'-deoxy-2'-fluorouridine-3'-phosphate
  modified_base 10: mod_base = OTHER; note = 2'-deoxy-2'-fluoroadenosine-3'-phosphate
  modified_base 11: mod_base = OTHER; note = 2'-deoxy-2'-fluoroadenosine-3'-phosphate
  modified_base 12: mod_base = OTHER; note = 2'-O-methyladenosine-3'-phosphate
  modified_base 13: mod_base = OTHER; note = 2'-O-methylcytidine-3'-phosphate
  modified_base 14: mod_base = OTHER; note = 2'-O-methylcytidine-3'-phosphate
  modified_base 15: mod_base = OTHER; note = 2'-O-methylcytidine-3'-phosphate
  modified_base 16: mod_base = OTHER; note = 2'-O-methyluridine-3'-phosphate
  modified_base 17: mod_base = OTHER; note = 2'-O-methyluridine-3'-phosphate
  modified_base 18: mod_base = OTHER; note = 2'-O-methyluridine-3'-phosphate
  modified_base 19: mod_base = OTHER; note = 2'-O-methyluridine-3'-phosphorothioate
  modified_base 20: mod_base = OTHER; note = 2'-O-methyladenosine-3'-phosphorothioate
  modified_base 21: mod_base = OTHER; note = 2'-O-methyladenosine
gtcaggattaaacccttttaa

SEQ ID NO: 2074 - RNA, 21 nt, synthetic construct
  source 1..21: mol_type = other RNA
  modified_base 1: mod_base = OTHER; note = 2'-O-methyladenosine-3'-phosphorothioate
  modified_base 2: mod_base = OTHER; note = 2'-O-methyladenosine-3'-phosphorothioate
  modified_base 3: mod_base = OTHER; note = 2'-O-methylcytidine-3'-phosphate
  modified_base 4: mod_base = OTHER; note = 2'-O-methylcytidine-3'-phosphate
  modified_base 5: mod_base = OTHER; note = 2'-O-methylcytidine-3'-phosphate
  modified_base 6: mod_base = OTHER; note = 2'-O-hexadecyl-uridine-3'-phosphate
  modified_base 7: mod_base = OTHER; note = 2'-deoxy-2'-fluorouridine-3'-phosphate
  modified_base 8: mod_base = OTHER; note = 2'-O-methyluridine-3'-phosphate
  modified_base 9: mod_base = OTHER; note = 2'-deoxy-2'-fluorouridine-3'-phosphate
  modified_base 10: mod_base = OTHER; note = 2'-deoxy-2'-fluoroadenosine-3'-phosphate
  modified_base 11: mod_base = OTHER; note = 2'-deoxy-2'-fluorouridine-3'-phosphate
  modified_base 12: mod_base = OTHER; note = 2'-O-methyladenosine-3'-phosphate
  modified_base 13: mod_base = OTHER; note = 2'-O-methyluridine-3'-phosphate
  modified_base 14: mod_base = OTHER; note = 2'-O-methyladenosine-3'-phosphate
  modified_base 15: mod_base = OTHER; note = 2'-O-methyluridine-3'-phosphate
  modified_base 16: mod_base = OTHER; note = 2'-O-methyluridine-3'-phosphate
  modified_base 17: mod_base = OTHER; note = 2'-O-methylcytidine-3'-phosphate
  modified_base 18: mod_base = OTHER; note = 2'-O-methyluridine-3'-phosphate
  modified_base 19: mod_base = OTHER; note = 2'-O-methylcytidine-3'-phosphorothioate
  modified_base 20: mod_base = OTHER; note = 2'-O-methylguanosine-3'-phosphorothioate
  modified_base 21: mod_base = OTHER; note = 2'-O-methyladenosine
aacccttttatatattctcga

SEQ ID NO: 2075 - RNA, 21 nt, synthetic construct
  source 1..21: mol_type = other RNA
  modified_base 1: mod_base = OTHER; note = 2'-O-methyluridine-3'-phosphorothioate
  modified_base 2: mod_base = OTHER; note = 2'-O-methyluridine-3'-phosphorothioate
  modified_base 3: mod_base = OTHER; note = 2'-O-methyluridine-3'-phosphate
  modified_base 4: mod_base = OTHER; note = 2'-O-methyluridine-3'-phosphate
  modified_base 5: mod_base = OTHER; note = 2'-O-methyladenosine-3'-phosphate
  modified_base 6: mod_base = OTHER; note = 2'-O-hexadecyl-uridine-3'-phosphate
  modified_base 7: mod_base = OTHER; note = 2'-deoxy-2'-fluoroadenosine-3'-phosphate
  modified_base 8: mod_base = OTHER; note = 2'-O-methyluridine-3'-phosphate
  modified_base 9: mod_base = OTHER; note = 2'-deoxy-2'-fluoroadenosine-3'-phosphate
  modified_base 10: mod_base = OTHER; note = 2'-deoxy-2'-fluorouridine-3'-phosphate
  modified_base 11: mod_base = OTHER; note = 2'-deoxy-2'-fluorouridine-3'-phosphate
  modified_base 12: mod_base = OTHER; note = 2'-O-methylcytidine-3'-phosphate
  modified_base 13: mod_base = OTHER; note = 2'-O-methyluridine-3'-phosphate
  modified_base 14: mod_base = OTHER; note = 2'-O-methylcytidine-3'-phosphate
  modified_base 15: mod_base = OTHER; note = 2'-O-methylguanosine-3'-phosphate
  modified_base 16: mod_base = OTHER; note = 2'-O-methylguanosine-3'-phosphate
  modified_base 17: mod_base = OTHER; note = 2'-O-methyladenosine-3'-phosphate
  modified_base 18: mod_base = OTHER; note = 2'-O-methyladenosine-3'-phosphate
  modified_base 19: mod_base = OTHER; note = 2'-O-methylcytidine-3'-phosphorothioate
  modified_base 20: mod_base = OTHER; note = 2'-O-methyladenosine-3'-phosphorothioate
  modified_base 21: mod_base = OTHER; note = 2'-O-methyladenosine
ttttatatattctcggaacaa

SEQ ID NO: 2076 - RNA, 21 nt, synthetic construct
  source 1..21: mol_type = other RNA
  modified_base 1: mod_base = OTHER; note = 2'-O-methyluridine-3'-phosphorothioate
  modified_base 2: mod_base = OTHER; note = 2'-O-methyladenosine-3'-phosphorothioate
  modified_base 3: mod_base = OTHER; note = 2'-O-methyluridine-3'-phosphate
  modified_base 4: mod_base = OTHER; note = 2'-O-methyladenosine-3'-phosphate
  modified_base 5: mod_base = OTHER; note = 2'-O-methyluridine-3'-phosphate
  modified_base 6: mod_base = OTHER; note = 2'-O-hexadecyl-uridine-3'-phosphate
  modified_base 7: mod_base = OTHER; note = 2'-deoxy-2'-fluorocytidine-3'-phosphate
  modified_base 8: mod_base = OTHER; note = 2'-O-methyluridine-3'-phosphate
  modified_base 9: mod_base = OTHER; note = 2'-deoxy-2'-fluorocytidine-3'-phosphate
  modified_base 10: mod_base = OTHER; note = 2'-deoxy-2'-fluoroguanosine-3'-phosphate
  modified_base 11: mod_base = OTHER; note = 2'-deoxy-2'-fluoroguanosine-3'-phosphate
  modified_base 12: mod_base = OTHER; note = 2'-O-methyladenosine-3'-phosphate
  modified_base 13: mod_base = OTHER; note = 2'-O-methyladenosine-3'-phosphate
  modified_base 14: mod_base = OTHER; note = 2'-O-methylcytidine-3'-phosphate
  modified_base 15: mod_base = OTHER; note = 2'-O-methyladenosine-3'-phosphate
  modified_base 16: mod_base = OTHER; note = 2'-O-methylguanosine-3'-phosphate
  modified_base 17: mod_base = OTHER; note = 2'-O-methyluridine-3'-phosphate
  modified_base 18: mod_base = OTHER; note = 2'-O-methylguanosine-3'-phosphate
  modified_base 19: mod_base = OTHER; note = 2'-O-methylcytidine-3'-phosphorothioate
  modified_base 20: mod_base = OTHER; note = 2'-O-methyladenosine-3'-phosphorothioate
  modified_base 21: mod_base = OTHER; note = 2'-O-methyladenosine
tatattctcggaacagtgcaa

SEQ ID NO: 2077 - RNA, 21 nt, synthetic construct
  source 1..21: mol_type = other RNA
  modified_base 1: mod_base = OTHER; note = 2'-O-methyluridine-3'-phosphorothioate
  modified_base 2: mod_base = OTHER; note = 2'-O-methylcytidine-3'-phosphorothioate
  modified_base 3: mod_base = OTHER; note = 2'-O-methyluridine-3'-phosphate
  modified_base 4: mod_base = OTHER; note = 2'-O-methylcytidine-3'-phosphate
  modified_base 5: mod_base = OTHER; note = 2'-O-methylguanosine-3'-phosphate
  modified_base 6: mod_base = OTHER; note = 2'-O-hexadecyl-guanosine-3'-phosphate
  modified_base 7: mod_base = OTHER; note = 2'-deoxy-2'-fluoroadenosine-3'-phosphate
  modified_base 8: mod_base = OTHER; note = 2'-O-methyladenosine-3'-phosphate
  modified_base 9: mod_base = OTHER; note = 2'-deoxy-2'-fluorocytidine-3'-phosphate
  modified_base 10: mod_base = OTHER; note = 2'-deoxy-2'-fluoroadenosine-3'-phosphate
  modified_base 11: mod_base = OTHER; note = 2'-deoxy-2'-fluoroguanosine-3'-phosphate
  modified_base 12: mod_base = OTHER; note = 2'-O-methyluridine-3'-phosphate
  modified_base 13: mod_base = OTHER; note = 2'-O-methylguanosine-3'-phosphate
  modified_base 14: mod_base = OTHER; note = 2'-O-methylcytidine-3'-phosphate
  modified_base 15: mod_base = OTHER; note = 2'-O-methyladenosine-3'-phosphate
  modified_base 16: mod_base = OTHER; note = 2'-O-methylguanosine-3'-phosphate
  modified_base 17: mod_base = OTHER; note = 2'-O-methylguanosine-3'-phosphate
  modified_base 18: mod_base = OTHER; note = 2'-O-methylguanosine-3'-phosphate
  modified_base 19: mod_base = OTHER; note = 2'-O-methylcytidine-3'-phosphorothioate
  modified_base 20: mod_base = OTHER; note = 2'-O-methyluridine-3'-phosphorothioate
  modified_base 21: mod_base = OTHER; note = 2'-O-methyladenosine
tctcggaacagtgcagggcta

SEQ ID NO: 2078 - RNA, 21 nt, synthetic construct
  source 1..21: mol_type = other RNA
  modified_base 1: mod_base = OTHER; note = 2'-O-methylguanosine-3'-phosphorothioate
  modified_base 2: mod_base = OTHER; note = 2'-O-methylcytidine-3'-phosphorothioate
  modified_base 3: mod_base = OTHER; note = 2'-O-methyladenosine-3'-phosphate
  modified_base 4: mod_base = OTHER; note = 2'-O-methylguanosine-3'-phosphate
  modified_base 5: mod_base = OTHER; note = 2'-O-methylguanosine-3'-phosphate
  modified_base 6: mod_base = OTHER; note = 2'-O-hexadecyl-guanosine-3'-phosphate
  modified_base 7: mod_base = OTHER; note = 2'-deoxy-2'-fluorocytidine-3'-phosphate
  modified_base 8: mod_base = OTHER; note = 2'-O-methyluridine-3'-phosphate
  modified_base 9: mod_base = OTHER; note = 2'-deoxy-2'-fluoroguanosine-3'-phosphate
  modified_base 10: mod_base = OTHER; note = 2'-deoxy-2'-fluoroadenosine-3'-phosphate
  modified_base 11: mod_base = OTHER; note = 2'-deoxy-2'-fluoroguanosine-3'-phosphate
  modified_base 12: mod_base = OTHER; note = 2'-O-methyladenosine-3'-phosphate
  modified_base 13: mod_base = OTHER; note = 2'-O-methyladenosine-3'-phosphate
  modified_base 14: mod_base = OTHER; note = 2'-O-methylguanosine-3'-phosphate
  modified_base 15: mod_base = OTHER; note = 2'-O-methylguanosine-3'-phosphate
  modified_base 16: mod_base = OTHER; note = 2'-O-methyladenosine-3'-phosphate
  modified_base 17: mod_base = OTHER; note = 2'-O-methyladenosine-3'-phosphate
  modified_base 18: mod_base = OTHER; note = 2'-O-methyladenosine-3'-phosphate
  modified_base 19: mod_base = OTHER; note = 2'-O-methylguanosine-3'-phosphorothioate
  modified_base 20: mod_base = OTHER; note = 2'-O-methyluridine-3'-phosphorothioate
  modified_base 21: mod_base = OTHER; note = 2'-O-methyladenosine
gcagggctgagaaggaaagta

SEQ ID NO: 2079 - RNA, 21 nt, synthetic construct
  source 1..21: mol_type = other RNA
  modified_base 1: mod_base = OTHER; note = 2'-O-methylguanosine-3'-phosphorothioate
  modified_base 2: mod_base = OTHER; note = 2'-O-methylcytidine-3'-phosphorothioate
  modified_base 3: mod_base = OTHER; note = 2'-O-methyluridine-3'-phosphate
  modified_base 4: mod_base = OTHER; note = 2'-O-methylguanosine-3'-phosphate
  modified_base 5: mod_base = OTHER; note = 2'-O-methyladenosine-3'-phosphate
  modified_base 6: mod_base = OTHER; note = 2'-O-hexadecyl-guanosine-3'-phosphate
  modified_base 7: mod_base = OTHER; note = 2'-deoxy-2'-fluoroadenosine-3'-phosphate
  modified_base 8: mod_base = OTHER; note = 2'-O-methyladenosine-3'-phosphate
  modified_base 9: mod_base = OTHER; note = 2'-deoxy-2'-fluoroguanosine-3'-phosphate
  modified_base 10: mod_base = OTHER; note = 2'-deoxy-2'-fluoroguanosine-3'-phosphate
  modified_base 11: mod_base = OTHER; note = 2'-deoxy-2'-fluoroadenosine-3'-phosphate
  modified_base 12: mod_base = OTHER; note = 2'-O-methyladenosine-3'-phosphate
  modified_base 13: mod_base = OTHER; note = 2'-O-methyladenosine-3'-phosphate
  modified_base 14: mod_base = OTHER; note = 2'-O-methylguanosine-3'-phosphate
  modified_base 15: mod_base = OTHER; note = 2'-O-methyluridine-3'-phosphate
  modified_base 16: mod_base = OTHER; note = 2'-O-methylguanosine-3'-phosphate
  modified_base 17: mod_base = OTHER; note = 2'-O-methylcytidine-3'-phosphate
  modified_base 18: mod_base = OTHER; note = 2'-O-methyluridine-3'-phosphate
  modified_base 19: mod_base = OTHER; note = 2'-O-methylcytidine-3'-phosphorothioate
  modified_base 20: mod_base = OTHER; note = 2'-O-methyluridine-3'-phosphorothioate
  modified_base 21: mod_base = OTHER; note = 2'-O-methyladenosine
gctgagaaggaaagtgctcta

SEQ ID NO: 2080 - RNA, 21 nt, synthetic construct
  source 1..21: mol_type = other RNA
  modified_base 1: mod_base = OTHER; note = 2'-O-methylguanosine-3'-phosphorothioate
  modified_base 2: mod_base = OTHER; note = 2'-O-methyladenosine-3'-phosphorothioate
  modified_base 3: mod_base = OTHER; note = 2'-O-methyladenosine-3'-phosphate
  modified_base 4: mod_base = OTHER; note = 2'-O-methylguanosine-3'-phosphate
  modified_base 5: mod_base = OTHER; note = 2'-O-methylguanosine-3'-phosphate
  modified_base 6: mod_base = OTHER; note = 2'-O-hexadecyl-adenosine-3'-phosphate
  modified_base 7: mod_base = OTHER; note = 2'-deoxy-2'-fluoroadenosine-3'-phosphate
  modified_base 8: mod_base = OTHER; note = 2'-O-methyladenosine-3'-phosphate
  modified_base 9: mod_base = OTHER; note = 2'-deoxy-2'-fluoroguanosine-3'-phosphate
  modified_base 10: mod_base = OTHER; note = 2'-deoxy-2'-fluorouridine-3'-phosphate
  modified_base 11: mod_base = OTHER; note = 2'-deoxy-2'-fluoroguanosine-3'-phosphate
  modified_base 12: mod_base = OTHER; note = 2'-O-methylcytidine-3'-phosphate
  modified_base 13: mod_base = OTHER; note = 2'-O-methyluridine-3'-phosphate
  modified_base 14: mod_base = OTHER; note = 2'-O-methylcytidine-3'-phosphate
  modified_base 15: mod_base = OTHER; note = 2'-O-methyluridine-3'-phosphate
  modified_base 16: mod_base = OTHER; note = 2'-O-methylguanosine-3'-phosphate
  modified_base 17: mod_base = OTHER; note = 2'-O-methylguanosine-3'-phosphate
  modified_base 18: mod_base = OTHER; note = 2'-O-methyluridine-3'-phosphate
  modified_base 19: mod_base = OTHER; note = 2'-O-methylguanosine-3'-phosphorothioate
  modified_base 20: mod_base = OTHER; note = 2'-O-methylcytidine-3'-phosphorothioate
  modified_base 21: mod_base = OTHER; note = 2'-O-methyladenosine
gaaggaaagtgctctggtgca

SEQ ID NO: 2081 - RNA, 21 nt, synthetic construct
  source 1..21: mol_type = other RNA
  modified_base 1: mod_base = OTHER; note = 2'-O-methylcytidine-3'-phosphorothioate
  modified_base 2: mod_base = OTHER; note = 2'-O-methyluridine-3'-phosphorothioate
  modified_base 3: mod_base = OTHER; note = 2'-O-methylguanosine-3'-phosphate
  modified_base 4: mod_base = OTHER; note = 2'-O-methylguanosine-3'-phosphate
  modified_base 5: mod_base = OTHER; note = 2'-O-methyluridine-3'-phosphate
  modified_base 6: mod_base = OTHER; note = 2'-O-hexadecyl-guanosine-3'-phosphate
  modified_base 7: mod_base = OTHER; note = 2'-deoxy-2'-fluorocytidine-3'-phosphate
  modified_base 8: mod_base = OTHER; note = 2'-O-methylcytidine-3'-phosphate
  modified_base 9: mod_base = OTHER; note = 2'-deoxy-2'-fluorouridine-3'-phosphate
  modified_base 10: mod_base = OTHER; note = 2'-deoxy-2'-fluorocytidine-3'-phosphate
  modified_base 11: mod_base = OTHER; note = 2'-deoxy-2'-fluorocytidine-3'-phosphate
  modified_base 12: mod_base = OTHER; note = 2'-O-methyladenosine-3'-phosphate
  modified_base 13: mod_base = OTHER; note = 2'-O-methyladenosine-3'-phosphate
  modified_base 14: mod_base = OTHER; note = 2'-O-methyluridine-3'-phosphate
  modified_base 15: mod_base = OTHER; note = 2'-O-methyladenosine-3'-phosphate
  modified_base 16: mod_base = OTHER; note = 2'-O-methylcytidine-3'-phosphate
  modified_base 17: mod_base = OTHER; note = 2'-O-methyladenosine-3'-phosphate
  modified_base 18: mod_base = OTHER; note = 2'-O-methyluridine-3'-phosphate
  modified_base 19: mod_base = OTHER; note = 2'-O-methyladenosine-3'-phosphorothioate
  modified_base 20: mod_base = OTHER; note = 2'-O-methylguanosine-3'-phosphorothioate
  modified_base 21: mod_base = OTHER; note = 2'-O-methyladenosine
ctggtgcctccaatacataga

SEQ ID NO: 2082 - RNA, 21 nt, synthetic construct
  source 1..21: mol_type = other RNA
  modified_base 1: mod_base = OTHER; note = 2'-O-methylcytidine-3'-phosphorothioate
  modified_base 2: mod_base = OTHER; note = 2'-O-methylcytidine-3'-phosphorothioate
  modified_base 3: mod_base = OTHER; note = 2'-O-methyluridine-3'-phosphate
  modified_base 4: mod_base = OTHER; note = 2'-O-methylcytidine-3'-phosphate
  modified_base 5: mod_base = OTHER; note = 2'-O-methylcytidine-3'-phosphate
  modified_base 6: mod_base = OTHER; note = 2'-O-hexadecyl-adenosine-3'-phosphate
  modified_base 7: mod_base = OTHER; note = 2'-deoxy-2'-fluoroadenosine-3'-phosphate
  modified_base 8: mod_base = OTHER; note = 2'-O-methyluridine-3'-phosphate
  modified_base 9: mod_base = OTHER; note = 2'-deoxy-2'-fluoroadenosine-3'-phosphate
  modified_base 10: mod_base = OTHER; note = 2'-deoxy-2'-fluorocytidine-3'-phosphate
  modified_base 11: mod_base = OTHER; note = 2'-deoxy-2'-fluoroadenosine-3'-phosphate
  modified_base 12: mod_base = OTHER; note = 2'-O-methyluridine-3'-phosphate
  modified_base 13: mod_base = OTHER; note = 2'-O-methyladenosine-3'-phosphate
  modified_base 14: mod_base = OTHER; note = 2'-O-methylguanosine-3'-phosphate
  modified_base 15: mod_base = OTHER; note = 2'-O-methylguanosine-3'-phosphate
  modified_base 16: mod_base = OTHER; note = 2'-O-methylcytidine-3'-phosphate
  modified_base 17: mod_base = OTHER; note = 2'-O-methylcytidine-3'-phosphate
  modified_base 18: mod_base = OTHER; note = 2'-O-methyluridine-3'-phosphate
  modified_base 19: mod_base = OTHER; note = 2'-O-methylguanosine-3'-phosphorothioate
  modified_base 20: mod_base = OTHER; note = 2'-O-methylguanosine-3'-phosphorothioate
  modified_base 21: mod_base = OTHER; note = 2'-O-methyladenosine
cctccaatacataggcctgga

SEQ ID NO: 2083 - RNA, 21 nt, synthetic construct
  source 1..21: mol_type = other RNA
  modified_base 1: mod_base = OTHER; note = 2'-O-methyladenosine-3'-phosphorothioate
  modified_base 2: mod_base = OTHER; note = 2'-O-methyladenosine-3'-phosphorothioate
  modified_base 3: mod_base = OTHER; note = 2'-O-methyluridine-3'-phosphate
  modified_base 4: mod_base = OTHER; note = 2'-O-methyladenosine-3'-phosphate
  modified_base 5: mod_base = OTHER; note = 2'-O-methylcytidine-3'-phosphate
  modified_base 6: mod_base = OTHER; note = 2'-O-hexadecyl-adenosine-3'-phosphate
  modified_base 7: mod_base = OTHER; note = 2'-deoxy-2'-fluorouridine-3'-phosphate
  modified_base 8: mod_base = OTHER; note = 2'-O-methyladenosine-3'-phosphate
  modified_base 9: mod_base = OTHER; note = 2'-deoxy-2'-fluoroguanosine-3'-phosphate
  modified_base 10: mod_base = OTHER; note = 2'-deoxy-2'-fluoroguanosine-3'-phosphate
  modified_base 11: mod_base = OTHER; note = 2'-deoxy-2'-fluorocytidine-3'-phosphate
  modified_base 12: mod_base = OTHER; note = 2'-O-methylcytidine-3'-phosphate
  modified_base 13: mod_base = OTHER; note = 2'-O-methyluridine-3'-phosphate
  modified_base 14: mod_base = OTHER; note = 2'-O-methylguanosine-3'-phosphate
  modified_base 15: mod_base = OTHER; note = 2'-O-methylguanosine-3'-phosphate
  modified_base 16: mod_base = OTHER; note = 2'-O-methylguanosine-3'-phosphate
  modified_base 17: mod_base = OTHER; note = 2'-O-methyluridine-3'-phosphate
  modified_base 18: mod_base = OTHER; note = 2'-O-methyluridine-3'-phosphate
  modified_base 19: mod_base = OTHER; note = 2'-O-methyluridine-3'-phosphorothioate
  modified_base 20: mod_base = OTHER; note = 2'-O-methyluridine-3'-phosphorothioate
  modified_base 21: mod_base = OTHER; note = 2'-O-methyladenosine
aatacataggcctgggtttta

SEQ ID NO: 2084 - RNA, 21 nt, synthetic construct
  source 1..21: mol_type = other RNA
  modified_base 1: mod_base = OTHER; note = 2'-O-methyluridine-3'-phosphorothioate
  modified_base 2: mod_base = OTHER; note = 2'-O-methyluridine-3'-phosphorothioate
  modified_base 3: mod_base = OTHER; note = 2'-O-methyluridine-3'-phosphate
  modified_base 4: mod_base = OTHER; note = 2'-O-methylcytidine-3'-phosphate
  modified_base 5: mod_base = OTHER; note = 2'-O-methyluridine-3'-phosphate
  modified_base 6: mod_base = OTHER; note = 2'-O-hexadecyl-guanosine-3'-phosphate
  modified_base 7: mod_base = OTHER; note = 2'-deoxy-2'-fluorocytidine-3'-phosphate
  modified_base 8: mod_base = OTHER; note = 2'-O-methyluridine-3'-phosphate
  modified_base 9: mod_base = OTHER; note = 2'-deoxy-2'-fluoroguanosine-3'-phosphate
  modified_base 10: mod_base = OTHER; note = 2'-deoxy-2'-fluorocytidine-3'-phosphate
  modified_base 11: mod_base = OTHER; note = 2'-deoxy-2'-fluoroadenosine-3'-phosphate
  modified_base 12: mod_base = OTHER; note = 2'-O-methyladenosine-3'-phosphate
  modified_base 13: mod_base = OTHER; note = 2'-O-methyladenosine-3'-phosphate
  modified_base 14: mod_base = OTHER; note = 2'-O-methylcytidine-3'-phosphate
  modified_base 15: mod_base = OTHER; note = 2'-O-methyladenosine-3'-phosphate
  modified_base 16: mod_base = OTHER; note = 2'-O-methyladenosine-3'-phosphate
  modified_base 17: mod_base = OTHER; note = 2'-O-methyladenosine-3'-phosphate
  modified_base 18: mod_base = OTHER; note = 2'-O-methyladenosine-3'-phosphate
  modified_base 19: mod_base = OTHER; note = 2'-O-methylguanosine-3'-phosphorothioate
  modified_base 20: mod_base = OTHER; note = 2'-O-methyladenosine-3'-phosphorothioate
  modified_base 21: mod_base = OTHER; note = 2'-O-methyladenosine
tttctgctgcaaacaaaagaa

SEQ ID NO: 2085 - RNA, 21 nt, synthetic construct
  source 1..21: mol_type = other RNA
  modified_base 1: mod_base = OTHER; note = 2'-O-methyluridine-3'-phosphorothioate
  modified_base 2: mod_base = OTHER; note = 2'-O-methylguanosine-3'-phosphorothioate
  modified_base 3: mod_base = OTHER; note = 2'-O-methylcytidine-3'-phosphate
  modified_base 4: mod_base = OTHER; note = 2'-O-methyladenosine-3'-phosphate
  modified_base 5: mod_base = OTHER; note = 2'-O-methyladenosine-3'-phosphate
  modified_base 6: mod_base = OTHER; note = 2'-O-hexadecyl-adenosine-3'-phosphate
  modified_base 7: mod_base = OTHER; note = 2'-deoxy-2'-fluorocytidine-3'-phosphate
  modified_base 8: mod_base = OTHER; note = 2'-O-methyladenosine-3'-phosphate
  modified_base 9: mod_base = OTHER; note = 2'-deoxy-2'-fluoroadenosine-3'-phosphate
  modified_base 10: mod_base = OTHER; note = 2'-deoxy-2'-fluoroadenosine-3'-phosphate
  modified_base 11: mod_base = OTHER; note = 2'-deoxy-2'-fluoroadenosine-3'-phosphate
  modified_base 12: mod_base = OTHER; note = 2'-O-methylguanosine-3'-phosphate
  modified_base 13: mod_base = OTHER; note = 2'-O-methyladenosine-3'-phosphate
  modified_base 14: mod_base = OTHER; note = 2'-O-methylcytidine-3'-phosphate
  modified_base 15: mod_base = OTHER; note = 2'-O-methyluridine-3'-phosphate
  modified_base 16: mod_base = OTHER; note = 2'-O-methylcytidine-3'-phosphate
  modified_base 17: mod_base = OTHER; note = 2'-O-methylguanosine-3'-phosphate
  modified_base 18: mod_base = OTHER; note = 2'-O-methyladenosine-3'-phosphate
  modified_base 19: mod_base = OTHER; note = 2'-O-methylcytidine-3'-phosphorothioate
  modified_base 20: mod_base = OTHER; note = 2'-O-methyluridine-3'-phosphorothioate
  modified_base 21: mod_base = OTHER; note = 2'-O-methyladenosine
tgcaaacaaaagactcgacta

SEQ ID NO: 2086 - RNA, 21 nt, synthetic construct
  source 1..21: mol_type = other RNA
  modified_base 1: mod_base = OTHER; note = 2'-O-methyladenosine-3'-phosphorothioate
  modified_base 2: mod_base = OTHER; note = 2'-O-methylcytidine-3'-phosphorothioate
  modified_base 3: mod_base = OTHER; note = 2'-O-methyladenosine-3'-phosphate
  modified_base 4: mod_base = OTHER; note = 2'-O-methyladenosine-3'-phosphate
  modified_base 5: mod_base = OTHER; note = 2'-O-methyladenosine-3'-phosphate
  modified_base 6: mod_base = OTHER; note = 2'-O-hexadecyl-adenosine-3'-phosphate
  modified_base 7: mod_base = OTHER; note = 2'-deoxy-2'-fluoroguanosine-3'-phosphate
  modified_base 8: mod_base = OTHER; note = 2'-O-methyladenosine-3'-phosphate
  modified_base 9: mod_base = OTHER; note = 2'-deoxy-2'-fluorocytidine-3'-phosphate
  modified_base 10: mod_base = OTHER; note = 2'-deoxy-2'-fluorouridine-3'-phosphate
  modified_base 11: mod_base = OTHER; note = 2'-deoxy-2'-fluorocytidine-3'-phosphate
  modified_base 12: mod_base = OTHER; note = 2'-O-methylguanosine-3'-phosphate
  modified_base 13: mod_base = OTHER; note = 2'-O-methyladenosine-3'-phosphate
  modified_base 14: mod_base = OTHER; note = 2'-O-methylcytidine-3'-phosphate
  modified_base 15: mod_base = OTHER; note = 2'-O-methyluridine-3'-phosphate
  modified_base 16: mod_base = OTHER; note = 2'-O-methyluridine-3'-phosphate
  modified_base 17: mod_base = OTHER; note = 2'-O-methylcytidine-3'-phosphate
  modified_base 18: mod_base = OTHER; note = 2'-O-methylguanosine-3'-phosphate
  modified_base 19: mod_base = OTHER; note = 2'-O-methyladenosine-3'-phosphorothioate
  modified_base 20: mod_base = OTHER; note = 2'-O-methylguanosine-3'-phosphorothioate
  modified_base 21: mod_base = OTHER; note = 2'-O-methyladenosine
acaaaagactcgacttcgaga

SEQ ID NO: 2087 - RNA, 21 nt, synthetic construct
  source 1..21: mol_type = other RNA
  modified_base 1: mod_base = OTHER; note = 2'-O-methyladenosine-3'-phosphorothioate
  modified_base 2: mod_base = OTHER; note = 2'-O-methylguanosine-3'-phosphorothioate
  modified_base 3: mod_base = OTHER; note = 2'-O-methyladenosine-3'-phosphate
  modified_base 4: mod_base = OTHER; note = 2'-O-methylcytidine-3'-phosphate
  modified_base 5: mod_base = OTHER; note = 2'-O-methyluridine-3'-phosphate
  modified_base 6: mod_base = OTHER; note = 2'-O-hexadecyl-cytidine-3'-phosphate
  modified_base 7: mod_base = OTHER; note = 2'-deoxy-2'-fluoroguanosine-3'-phosphate
  modified_base 8: mod_base = OTHER; note = 2'-O-methyladenosine-3'-phosphate
  modified_base 9: mod_base = OTHER; note = 2'-deoxy-2'-fluorocytidine-3'-phosphate
  modified_base 10: mod_base = OTHER; note = 2'-deoxy-2'-fluorouridine-3'-phosphate
  modified_base 11: mod_base = OTHER; note = 2'-deoxy-2'-fluorouridine-3'-phosphate
  modified_base 12: mod_base = OTHER; note = 2'-O-methylcytidine-3'-phosphate
  modified_base 13: mod_base = OTHER; note = 2'-O-methylguanosine-3'-phosphate
  modified_base 14: mod_base = OTHER; note = 2'-O-methyladenosine-3'-phosphate
  modified_base 15: mod_base = OTHER; note = 2'-O-methylguanosine-3'-phosphate
  modified_base 16: mod_base = OTHER; note = 2'-O-methylcytidine-3'-phosphate
  modified_base 17: mod_base = OTHER; note = 2'-O-methylcytidine-3'-phosphate
  modified_base 18: mod_base = OTHER; note = 2'-O-methyladenosine-3'-phosphate
  modified_base 19: mod_base = OTHER; note = 2'-O-methyluridine-3'-phosphorothioate
  modified_base 20: mod_base = OTHER; note = 2'-O-methylguanosine-3'-phosphorothioate
  modified_base 21: mod_base = OTHER; note = 2'-O-methyladenosine
agactcgacttcgagccatga

SEQ ID NO: 2088 - RNA, 21 nt, synthetic construct
  source 1..21: mol_type = other RNA
  modified_base 1: mod_base = OTHER; note = 2'-O-methylguanosine-3'-phosphorothioate
  modified_base 2: mod_base = OTHER; note = 2'-O-methyladenosine-3'-phosphorothioate
  modified_base 3: mod_base = OTHER; note = 2'-O-methylcytidine-3'-phosphate
  modified_base 4: mod_base = OTHER; note = 2'-O-methyluridine-3'-phosphate
  modified_base 5: mod_base = OTHER; note = 2'-O-methyluridine-3'-phosphate
  modified_base 6: mod_base = OTHER; note = 2'-O-hexadecyl-cytidine-3'-phosphate
  modified_base 7: mod_base = OTHER; note = 2'-deoxy-2'-fluoroguanosine-3'-phosphate
  modified_base 8: mod_base = OTHER; note = 2'-O-methyladenosine-3'-phosphate
  modified_base 9: mod_base = OTHER; note = 2'-deoxy-2'-fluoroguanosine-3'-phosphate
  modified_base 10: mod_base = OTHER; note = 2'-deoxy-2'-fluorocytidine-3'-phosphate
  modified_base 11: mod_base = OTHER; note = 2'-deoxy-2'-fluorocytidine-3'-phosphate
  modified_base 12: mod_base = OTHER; note = 2'-O-methyladenosine-3'-phosphate
  modified_base 13: mod_base = OTHER; note = 2'-O-methyluridine-3'-phosphate
  modified_base 14: mod_base = OTHER; note = 2'-O-methylguanosine-3'-phosphate
  modified_base 15: mod_base = OTHER; note = 2'-O-methylguanosine-3'-phosphate
  modified_base 16: mod_base = OTHER; note = 2'-O-methylguanosine-3'-phosphate
  modified_base 17: mod_base = OTHER; note = 2'-O-methyladenosine-3'-phosphate
  modified_base 18: mod_base = OTHER; note = 2'-O-methyladenosine-3'-phosphate
  modified_base 19: mod_base = OTHER; note = 2'-O-methyladenosine-3'-phosphorothioate
  modified_base 20: mod_base = OTHER; note = 2'-O-methyladenosine-3'-phosphorothioate
  modified_base 21: mod_base = OTHER; note = 2'-O-methyladenosine
gacttcgagccatgggaaaaa

SEQ ID NO: 2089 - RNA, 21 nt, synthetic construct
  source 1..21: mol_type = other RNA
  modified_base 1: mod_base = OTHER; note = 2'-O-methylcytidine-3'-phosphorothioate
  modified_base 2: mod_base = OTHER; note = 2'-O-methylguanosine-3'-phosphorothioate
  modified_base 3: mod_base = OTHER; note = 2'-O-methyladenosine-3'-phosphate
  modified_base 4: mod_base = OTHER; note = 2'-O-methylguanosine-3'-phosphate
  modified_base 5: mod_base = OTHER; note = 2'-O-methylcytidine-3'-phosphate
  modified_base 6: mod_base = OTHER; note = 2'-O-hexadecyl-cytidine-3'-phosphate
  modified_base 7: mod_base = OTHER; note = 2'-deoxy-2'-fluoroadenosine-3'-phosphate
  modified_base 8: mod_base = OTHER; note = 2'-O-methyluridine-3'-phosphate
  modified_base 9: mod_base = OTHER; note = 2'-deoxy-2'-fluoroguanosine-3'-phosphate
  modified_base 10: mod_base = OTHER; note = 2'-deoxy-2'-fluoroguanosine-3'-phosphate
  modified_base 11: mod_base = OTHER; note = 2'-deoxy-2'-fluoroguanosine-3'-phosphate
  modified_base 12: mod_base = OTHER; note = 2'-O-methyladenosine-3'-phosphate
  modified_base 13: mod_base = OTHER; note = 2'-O-methyladenosine-3'-phosphate
  modified_base 14: mod_base = OTHER; note = 2'-O-methyladenosine-3'-phosphate
  modified_base 15: mod_base = OTHER; note = 2'-O-methyladenosine-3'-phosphate
  modified_base 16: mod_base = OTHER; note = 2'-O-methylguanosine-3'-phosphate
  modified_base 17: mod_base = OTHER; note = 2'-O-methylguanosine-3'-phosphate
  modified_base 18: mod_base = OTHER; note = 2'-O-methylguanosine-3'-phosphate
  modified_base 19: mod_base = OTHER; note = 2'-O-methyladenosine-3'-phosphorothioate
  modified_base 20: mod_base = OTHER; note = 2'-O-methyladenosine-3'-phosphorothioate
  modified_base 21: mod_base = OTHER; note = 2'-O-methyladenosine
cgagccatgggaaaagggaaa

SEQ ID NO: 2090 - RNA, 21 nt, synthetic construct
  source 1..21: mol_type = other RNA
  modified_base 1: mod_base = OTHER; note = 2'-O-methylcytidine-3'-phosphorothioate
  modified_base 2: mod_base = OTHER; note = 2'-O-methyladenosine-3'-phosphorothioate
  modified_base 3: mod_base = OTHER; note = 2'-O-methyluridine-3'-phosphate
  modified_base 4: mod_base = OTHER; note = 2'-O-methylguanosine-3'-phosphate
  modified_base 5: mod_base = OTHER; note = 2'-O-methylguanosine-3'-phosphate
  modified_base 6: mod_base = OTHER; note = 2'-O-hexadecyl-guanosine-3'-phosphate
  modified_base 7: mod_base = OTHER; note = 2'-deoxy-2'-fluoroadenosine-3'-phosphate
  modified_base 8: mod_base = OTHER; note = 2'-O-methyladenosine-3'-phosphate
  modified_base 9: mod_base = OTHER; note = 2'-deoxy-2'-fluoroadenosine-3'-phosphate
  modified_base 10: mod_base = OTHER; note = 2'-deoxy-2'-fluoroadenosine-3'-phosphate
  modified_base 11: mod_base = OTHER; note = 2'-deoxy-2'-fluoroguanosine-3'-phosphate
  modified_base 12: mod_base = OTHER; note = 2'-O-methylguanosine-3'-phosphate
  modified_base 13: mod_base = OTHER; note = 2'-O-methylguanosine-3'-phosphate
  modified_base 14: mod_base = OTHER; note = 2'-O-methyladenosine-3'-phosphate
  modified_base 15: mod_base = OTHER; note = 2'-O-methyladenosine-3'-phosphate
  modified_base 16: mod_base = OTHER; note = 2'-O-methylcytidine-3'-phosphate
  modified_base 17: mod_base = OTHER; note = 2'-O-methylcytidine-3'-phosphate
  modified_base 18: mod_base = OTHER; note = 2'-O-methyluridine-3'-phosphate
  modified_base 19: mod_base = OTHER; note = 2'-O-methylcytidine-3'-phosphorothioate
  modified_base 20: mod_base = OTHER; note = 2'-O-methylguanosine-3'-phosphorothioate
  modified_base 21: mod_base = OTHER; note = 2'-O-methyladenosine
catgggaaaagggaacctcga

SEQ ID NO: 2091 - RNA, 21 nt, synthetic construct
  source 1..21: mol_type = other RNA
  modified_base 1: mod_base = OTHER; note = 2'-O-methyladenosine-3'-phosphorothioate
  modified_base 2: mod_base = OTHER; note = 2'-O-methyladenosine-3'-phosphorothioate
  modified_base 3: mod_base = OTHER; note = 2'-O-methyladenosine-3'-phosphate
  modified_base 4: mod_base = OTHER; note = 2'-O-methylguanosine-3'-phosphate
  modified_base 5: mod_base = OTHER; note = 2'-O-methylguanosine-3'-phosphate
  modified_base 6: mod_base = OTHER; note = 2'-O-hexadecyl-guanosine-3'-phosphate
  modified_base 7: mod_base = OTHER; note = 2'-deoxy-2'-fluoroadenosine-3'-phosphate
  modified_base 8: mod_base = OTHER; note = 2'-O-methyladenosine-3'-phosphate
  modified_base 9: mod_base = OTHER; note = 2'-deoxy-2'-fluorocytidine-3'-phosphate
  modified_base 10: mod_base = OTHER; note = 2'-deoxy-2'-fluorocytidine-3'-phosphate
  modified_base 11: mod_base = OTHER; note = 2'-deoxy-2'-fluorouridine-3'-phosphate
  modified_base 12: mod_base = OTHER; note = 2'-O-methylcytidine-3'-phosphate
  modified_base 13: mod_base = OTHER; note = 2'-O-methylguanosine-3'-phosphate
  modified_base 14: mod_base = OTHER; note = 2'-O-methyladenosine-3'-phosphate
  modified_base 15: mod_base = OTHER; note = 2'-O-methyladenosine-3'-phosphate
  modified_base 16: mod_base = OTHER; note = 2'-O-methylguanosine-3'-phosphate
  modified_base 17: mod_base = OTHER; note = 2'-O-methyluridine-3'-phosphate
  modified_base 18: mod_base = OTHER; note = 2'-O-methylcytidine-3'-phosphate
  modified_base 19: mod_base = OTHER; note = 2'-O-methyladenosine-3'-phosphorothioate
  modified_base 20: mod_base = OTHER; note = 2'-O-methyladenosine-3'-phosphorothioate
  modified_base 21: mod_base = OTHER; note = 2'-O-methyladenosine
aaagggaacctcgaagtcaaa

SEQ ID NO: 2092 - RNA, 21 nt, synthetic construct
  source 1..21: mol_type = other RNA
  modified_base 1: mod_base = OTHER; note = 2'-O-methyladenosine-3'-phosphorothioate
  modified_base 2: mod_base = OTHER; note = 2'-O-methyladenosine-3'-phosphorothioate
  modified_base 3: mod_base = OTHER; note = 2'-O-methylcytidine-3'-phosphate
  modified_base 4: mod_base = OTHER; note = 2'-O-methylcytidine-3'-phosphate
  modified_base 5: mod_base = OTHER; note = 2'-O-methyluridine-3'-phosphate
  modified_base 6: mod_base = OTHER; note = 2'-O-hexadecyl-cytidine-3'-phosphate
  modified_base 7: mod_base = OTHER; note = 2'-deoxy-2'-fluoroguanosine-3'-phosphate
  modified_base 8: mod_base = OTHER; note = 2'-O-methyladenosine-3'-phosphate
  modified_base 9: mod_base = OTHER; note = 2'-deoxy-2'-fluoroadenosine-3'-phosphate
  modified_base 10: mod_base = OTHER; note = 2'-deoxy-2'-fluoroguanosine-3'-phosphate
  modified_base 11: mod_base = OTHER; note = 2'-deoxy-2'-fluorouridine-3'-phosphate
  modified_base 12: mod_base = OTHER; note = 2'-O-methylcytidine-3'-phosphate
  modified_base 13: mod_base = OTHER; note = 2'-O-methyladenosine-3'-phosphate
  modified_base 14: mod_base = OTHER; note = 2'-O-methyladenosine-3'-phosphate
  modified_base 15: mod_base = OTHER; note = 2'-O-methylcytidine-3'-phosphate
  modified_base 16: mod_base = OTHER; note = 2'-O-methyladenosine-3'-phosphate
  modified_base 17: mod_base = OTHER; note = 2'-O-methylguanosine-3'-phosphate
  modified_base 18: mod_base = OTHER; note = 2'-O-methyladenosine-3'-phosphate
  modified_base 19: mod_base = OTHER; note = 2'-O-methyladenosine-3'-phosphorothioate
  modified_base 20: mod_base = OTHER; note = 2'-O-methyladenosine-3'-phosphorothioate
  modified_base 21: mod_base = OTHER; note = 2'-O-methyladenosine
aacctcgaagtcaacagaaaa

SEQ ID NO: 2093 - RNA, 21 nt, synthetic construct
  source 1..21: mol_type = other RNA
  modified_base 1: mod_base = OTHER; note = 2'-O-methylguanosine-3'-phosphorothioate
  modified_base 2: mod_base = OTHER; note = 2'-O-methyladenosine-3'-phosphorothioate
  modified_base 3: mod_base = OTHER; note = 2'-O-methyladenosine-3'-phosphate
  modified_base 4: mod_base = OTHER; note = 2'-O-methylguanosine-3'-phosphate
  modified_base 5: mod_base = OTHER; note = 2'-O-methyluridine-3'-phosphate
  modified_base 6: mod_base = OTHER; note = 2'-O-hexadecyl-cytidine-3'-phosphate
  modified_base 7: mod_base = OTHER; note = 2'-deoxy-2'-fluoroadenosine-3'-phosphate
  modified_base 8: mod_base = OTHER; note = 2'-O-methyladenosine-3'-phosphate
  modified_base 9: mod_base = OTHER; note = 2'-deoxy-2'-fluorocytidine-3'-phosphate
  modified_base 10: mod_base = OTHER; note = 2'-deoxy-2'-fluoroadenosine-3'-phosphate
  modified_base 11: mod_base = OTHER; note = 2'-deoxy-2'-fluoroguanosine-3'-phosphate
  modified_base 12: mod_base = OTHER; note = 2'-O-methyladenosine-3'-phosphate
  modified_base 13: mod_base = OTHER; note = 2'-O-methyladenosine-3'-phosphate
  modified_base 14: mod_base = OTHER; note = 2'-O-methyladenosine-3'-phosphate
  modified_base 15: mod_base = OTHER; note = 2'-O-methylcytidine-3'-phosphate
  modified_base 16: mod_base = OTHER; note = 2'-O-methyladenosine-3'-phosphate
  modified_base 17: mod_base = OTHER; note = 2'-O-methyladenosine-3'-phosphate
  modified_base 18: mod_base = OTHER; note = 2'-O-methyladenosine-3'-phosphate
  modified_base 19: mod_base = OTHER; note = 2'-O-methyluridine-3'-phosphorothioate
  modified_base 20: mod_base = OTHER; note = 2'-O-methylcytidine-3'-phosphorothioate
  modified_base 21: mod_base = OTHER; note = 2'-O-methyladenosine
gaagtcaacagaaacaaatca

SEQ ID NO: 2094 - RNA, 21 nt, synthetic construct
  source 1..21: mol_type = other RNA
  modified_base 1: mod_base = OTHER; note = 2'-O-methylcytidine-3'-phosphorothioate
  modified_base 2: mod_base = OTHER; note = 2'-O-methyladenosine-3'-phosphorothioate
  modified_base 3: mod_base = OTHER; note = 2'-O-methyladenosine-3'-phosphate
  modified_base 4: mod_base = OTHER; note = 2'-O-methylcytidine-3'-phosphate
  modified_base 5: mod_base = OTHER; note = 2'-O-methyladenosine-3'-phosphate
  modified_base 6: mod_base = OTHER; note = 2'-O-hexadecyl-guanosine-3'-phosphate
  modified_base 7: mod_base = OTHER; note = 2'-deoxy-2'-fluoroadenosine-3'-phosphate
  modified_base 8: mod_base = OTHER; note = 2'-O-methyladenosine-3'-phosphate
  modified_base 9: mod_base = OTHER; note = 2'-deoxy-2'-fluoroadenosine-3'-phosphate
  modified_base 10: mod_base = OTHER; note = 2'-deoxy-2'-fluorocytidine-3'-phosphate
  modified_base 11: mod_base = OTHER; note = 2'-deoxy-2'-fluoroadenosine-3'-phosphate
  modified_base 12: mod_base = OTHER; note = 2'-O-methyladenosine-3'-phosphate
  modified_base 13: mod_base = OTHER; note = 2'-O-methyladenosine-3'-phosphate
  modified_base 14: mod_base = OTHER; note = 2'-O-methyluridine-3'-phosphate
  modified_base 15: mod_base = OTHER; note = 2'-O-methylcytidine-3'-phosphate
  modified_base 16: mod_base = OTHER; note = 2'-O-methylcytidine-3'-phosphate
  modified_base 17: mod_base = OTHER; note = 2'-O-methyluridine-3'-phosphate
  modified_base 18: mod_base = OTHER; note = 2'-O-methylcytidine-3'-phosphate
  modified_base 19: mod_base = OTHER; note = 2'-O-methylcytidine-3'-phosphorothioate
  modified_base 20: mod_base = OTHER; note = 2'-O-methylcytidine-3'-phosphorothioate
  modified_base 21: mod_base = OTHER; note = 2'-O-methyladenosine
caacagaaacaaatcctccca

SEQ ID NO: 2095 - RNA, 21 nt, synthetic construct
  source 1..21: mol_type = other RNA
  modified_base 1: mod_base = OTHER; note = 2'-O-methyladenosine-3'-phosphorothioate
  modified_base 2: mod_base = OTHER; note = 2'-O-methyladenosine-3'-phosphorothioate
  modified_base 3: mod_base = OTHER; note = 2'-O-methyladenosine-3'-phosphate
  modified_base 4: mod_base = OTHER; note = 2'-O-methylcytidine-3'-phosphate
  modified_base 5: mod_base = OTHER; note = 2'-O-methyladenosine-3'-phosphate
  modified_base 6: mod_base = OTHER; note = 2'-O-hexadecyl-adenosine-3'-phosphate
  modified_base 7: mod_base = OTHER; note = 2'-deoxy-2'-fluoroadenosine-3'-phosphate
  modified_base 8: mod_base = OTHER; note = 2'-O-methyluridine-3'-phosphate
  modified_base 9: mod_base = OTHER; note = 2'-deoxy-2'-fluorocytidine-3'-phosphate
  modified_base 10: mod_base = OTHER; note = 2'-deoxy-2'-fluorocytidine-3'-phosphate
  modified_base 11: mod_base = OTHER; note = 2'-deoxy-2'-fluorouridine-3'-phosphate
  modified_base 12: mod_base = OTHER; note = 2'-O-methylcytidine-3'-phosphate
  modified_base 13: mod_base = OTHER; note = 2'-O-methylcytidine-3'-phosphate
  modified_base 14: mod_base = OTHER; note = 2'-O-methylcytidine-3'-phosphate
  modified_base 15: mod_base = OTHER; note = 2'-O-methyladenosine-3'-phosphate
  modified_base 16: mod_base = OTHER; note = 2'-O-methyluridine-3'-phosphate
  modified_base 17: mod_base = OTHER; note = 2'-O-methylcytidine-3'-phosphate
  modified_base 18: mod_base = OTHER; note = 2'-O-methyladenosine-3'-phosphate
  modified_base 19: mod_base = OTHER; note = 2'-O-methyluridine-3'-phosphorothioate
  modified_base 20: mod_base = OTHER; note = 2'-O-methylguanosine-3'-phosphorothioate
  modified_base 21: mod_base = OTHER; note = 2'-O-methyladenosine
aaacaaatcctcccatcatga

SEQ ID NO: 2096 - RNA, 21 nt, synthetic construct
  source 1..21: mol_type = other RNA
  modified_base 1: mod_base = OTHER; note = 2'-O-methyladenosine-3'-phosphorothioate
  modified_base 2: mod_base = OTHER; note = 2'-O-methyluridine-3'-phosphorothioate
  modified_base 3: mod_base = OTHER; note = 2'-O-methylcytidine-3'-phosphate
  modified_base 4: mod_base = OTHER; note = 2'-O-methylcytidine-3'-phosphate
  modified_base 5: mod_base = OTHER; note = 2'-O-methyluridine-3'-phosphate
  modified_base 6: mod_base = OTHER; note = 2'-O-hexadecyl-cytidine-3'-phosphate
  modified_base 7: mod_base = OTHER; note = 2'-deoxy-2'-fluorocytidine-3'-phosphate
  modified_base 8: mod_base = OTHER; note = 2'-O-methylcytidine-3'-phosphate
  modified_base 9: mod_base = OTHER; note = 2'-deoxy-2'-fluoroadenosine-3'-phosphate
  modified_base 10: mod_base = OTHER; note = 2'-deoxy-2'-fluorouridine-3'-phosphate
  modified_base 11: mod_base = OTHER; note = 2'-deoxy-2'-fluorocytidine-3'-phosphate
  modified_base 12: mod_base = OTHER; note = 2'-O-methyladenosine-3'-phosphate
  modified_base 13: mod_base = OTHER; note = 2'-O-methyluridine-3'-phosphate
  modified_base 14: mod_base = OTHER; note = 2'-O-methylguanosine-3'-phosphate
  modified_base 15: mod_base = OTHER; note = 2'-O-methyladenosine-3'-phosphate
  modified_base 16: mod_base = OTHER; note = 2'-O-methyladenosine-3'-phosphate
  modified_base 17: mod_base = OTHER; note = 2'-O-methyladenosine-3'-phosphate
  modified_base 18: mod_base = OTHER; note = 2'-O-methylcytidine-3'-phosphate
  modified_base 19: mod_base = OTHER; note = 2'-O-methyladenosine-3'-phosphorothioate
  modified_base 20: mod_base = OTHER; note = 2'-O-methyladenosine-3'-phosphorothioate
  modified_base 21: mod_base = OTHER; note = 2'-O-methyladenosine
atcctcccatcatgaaacaaa

SEQ ID NO: 2097 - RNA, 21 nt, synthetic construct
  source 1..21: mol_type = other RNA
  modified_base 1: mod_base = OTHER; note = 2'-O-methylcytidine-3'-phosphorothioate
  modified_base 2: mod_base = OTHER; note = 2'-O-methylcytidine-3'-phosphorothioate
  modified_base 3: mod_base = OTHER; note = 2'-O-methylcytidine-3'-phosphate
  modified_base 4: mod_base = OTHER; note = 2'-O-methyladenosine-3'-phosphate
  modified_base 5: mod_base = OTHER; note = 2'-O-methyluridine-3'-phosphate
  modified_base 6: mod_base = OTHER; note = 2'-O-hexadecyl-cytidine-3'-phosphate
  modified_base 7: mod_base = OTHER; note = 2'-deoxy-2'-fluoroadenosine-3'-phosphate
  modified_base 8: mod_base = OTHER; note = 2'-O-methyluridine-3'-phosphate
  modified_base 9: mod_base = OTHER; note = 2'-deoxy-2'-fluoroguanosine-3'-phosphate
  modified_base 10: mod_base = OTHER; note = 2'-deoxy-2'-fluoroadenosine-3'-phosphate
  modified_base 11: mod_base = OTHER; note = 2'-deoxy-2'-fluoroadenosine-3'-phosphate
  modified_base 12: mod_base = OTHER; note = 2'-O-methyladenosine-3'-phosphate
  modified_base 13: mod_base = OTHER; note = 2'-O-methylcytidine-3'-phosphate
  modified_base 14: mod_base = OTHER; note = 2'-O-methyladenosine-3'-phosphate
  modified_base 15: mod_base = OTHER; note = 2'-O-methyladenosine-3'-phosphate
  modified_base 16: mod_base = OTHER; note = 2'-O-methyladenosine-3'-phosphate
  modified_base 17: mod_base = OTHER; note = 2'-O-methylcytidine-3'-phosphate
  modified_base 18: mod_base = OTHER; note = 2'-O-methyluridine-3'-phosphate
  modified_base 19: mod_base = OTHER; note = 2'-O-methylcytidine-3'-phosphorothioate
  modified_base 20: mod_base = OTHER; note = 2'-O-methyluridine-3'-phosphorothioate
  modified_base 21: mod_base = OTHER; note = 2'-O-methyladenosine
cccatcatgaaacaaactcta

SEQ ID NO: 2098 - RNA, 21 nt, synthetic construct
  source 1..21: mol_type = other RNA
  modified_base 1: mod_base = OTHER; note = 2'-O-methyladenosine-3'-phosphorothioate
  modified_base 2: mod_base = OTHER; note = 2'-O-methyluridine-3'-phosphorothioate
  modified_base 3: mod_base = OTHER; note = 2'-O-methylguanosine-3'-phosphate
  modified_base 4: mod_base = OTHER; note = 2'-O-methyladenosine-3'-phosphate
  modified_base 5: mod_base = OTHER; note = 2'-O-methyladenosine-3'-phosphate
  modified_base 6: mod_base = OTHER; note = 2'-O-hexadecyl-adenosine-3'-phosphate
  modified_base 7: mod_base = OTHER; note = 2'-deoxy-2'-fluorocytidine-3'-phosphate
  modified_base 8: mod_base = OTHER; note = 2'-O-methyladenosine-3'-phosphate
  modified_base 9: mod_base = OTHER; note = 2'-deoxy-2'-fluoroadenosine-3'-phosphate
  modified_base 10: mod_base = OTHER; note = 2'-deoxy-2'-fluoroadenosine-3'-phosphate
  modified_base 11: mod_base = OTHER; note = 2'-deoxy-2'-fluorocytidine-3'-phosphate
  modified_base 12: mod_base = OTHER; note = 2'-O-methyluridine-3'-phosphate
  modified_base 13: mod_base = OTHER; note = 2'-O-methylcytidine-3'-phosphate
  modified_base 14: mod_base = OTHER; note = 2'-O-methyluridine-3'-phosphate
  modified_base 15: mod_base = OTHER; note = 2'-O-methylguanosine-3'-phosphate
  modified_base 16: mod_base = OTHER; note = 2'-O-methylcytidine-3'-phosphate
  modified_base 17: mod_base = OTHER; note = 2'-O-methylcytidine-3'-phosphate
  modified_base 18: mod_base = OTHER; note = 2'-O-methyluridine-3'-phosphate
  modified_base 19: mod_base = OTHER; note = 2'-O-methyladenosine-3'-phosphorothioate
  modified_base 20: mod_base = OTHER; note = 2'-O-methylcytidine-3'-phosphorothioate
  modified_base 21: mod_base = OTHER; note = 2'-O-methyladenosine
atgaaacaaactctgcctaca

SEQ ID NO: 2099 - RNA, 21 nt, synthetic construct
  source 1..21: mol_type = other RNA
  modified_base 1: mod_base = OTHER; note = 2'-O-methyladenosine-3'-phosphorothioate
  modified_base 2: mod_base = OTHER; note = 2'-O-methylcytidine-3'-phosphorothioate
  modified_base 3: mod_base = OTHER; note = 2'-O-methyluridine-3'-phosphate
  modified_base 4: mod_base = OTHER; note = 2'-O-methylcytidine-3'-phosphate
  modified_base 5: mod_base = OTHER; note = 2'-O-methyluridine-3'-phosphate
  modified_base 6: mod_base = OTHER; note = 2'-O-hexadecyl-guanosine-3'-phosphate
  modified_base 7: mod_base = OTHER; note = 2'-deoxy-2'-fluorocytidine-3'-phosphate
  modified_base 8: mod_base = OTHER; note = 2'-O-methylcytidine-3'-phosphate
  modified_base 9: mod_base = OTHER; note = 2'-deoxy-2'-fluorouridine-3'-phosphate
  modified_base 10: mod_base = OTHER; note = 2'-deoxy-2'-fluoroadenosine-3'-phosphate
  modified_base 11: mod_base = OTHER; note = 2'-deoxy-2'-fluorocytidine-3'-phosphate
  modified_base 12: mod_base = OTHER; note = 2'-O-methyladenosine-3'-phosphate
  modified_base 13: mod_base = OTHER; note = 2'-O-methyluridine-3'-phosphate
  modified_base 14: mod_base = OTHER; note = 2'-O-methylguanosine-3'-phosphate
  modified_base 15: mod_base = OTHER; note = 2'-O-methyluridine-3'-phosphate
  modified_base 16: mod_base = OTHER; note = 2'-O-methyluridine-3'-phosphate
  modified_base 17: mod_base = OTHER; note = 2'-O-methyladenosine-3'-phosphate
  modified_base 18: mod_base = OTHER; note = 2'-O-methyluridine-3'-phosphate
  modified_base 19: mod_base = OTHER; note = 2'-O-methylcytidine-3'-phosphorothioate
  modified_base 20: mod_base = OTHER; note = 2'-O-methyluridine-3'-phosphorothioate
  modified_base 21: mod_base = OTHER; note = 2'-O-methyladenosine
actctgcctacatgttatcta

SEQ ID NO: 2100 - RNA, 21 nt, synthetic construct
  source 1..21: mol_type = other RNA
  modified_base 1: mod_base = OTHER; note = 2'-O-methylguanosine-3'-phosphorothioate
  modified_base 2: mod_base = OTHER; note = 2'-O-methylcytidine-3'-phosphorothioate
  modified_base 3: mod_base = OTHER; note = 2'-O-methylcytidine-3'-phosphate
  modified_base 4: mod_base = OTHER; note = 2'-O-methyluridine-3'-phosphate
  modified_base 5: mod_base = OTHER; note = 2'-O-methyladenosine-3'-phosphate
  modified_base 6: mod_base = OTHER; note = 2'-O-hexadecyl-cytidine-3'-phosphate
  modified_base 7: mod_base = OTHER; note = 2'-deoxy-2'-fluoroadenosine-3'-phosphate
  modified_base 8: mod_base = OTHER; note = 2'-O-methyluridine-3'-phosphate
  modified_base 9: mod_base = OTHER; note = 2'-deoxy-2'-fluoroguanosine-3'-phosphate
  modified_base 10: mod_base = OTHER; note = 2'-deoxy-2'-fluorouridine-3'-phosphate
  modified_base 11: mod_base = OTHER; note = 2'-deoxy-2'-fluorouridine-3'-phosphate
  modified_base 12: mod_base = OTHER; note = 2'-O-methyladenosine-3'-phosphate
  modified_base 13: mod_base = OTHER; note = 2'-O-methyluridine-3'-phosphate
  modified_base 14: mod_base = OTHER; note = 2'-O-methylcytidine-3'-phosphate
  modified_base 15: mod_base = OTHER; note = 2'-O-methyluridine-3'-phosphate
  modified_base 16: mod_base = OTHER; note = 2'-O-methylcytidine-3'-phosphate
  modified_base 17: mod_base = OTHER; note = 2'-O-methylcytidine-3'-phosphate
  modified_base 18: mod_base = OTHER; note = 2'-O-methyladenosine-3'-phosphate
  modified_base 19: mod_base = OTHER; note = 2'-O-methyladenosine-3'-phosphorothioate
  modified_base 20: mod_base = OTHER; note = 2'-O-methyladenosine-3'-phosphorothioate
  modified_base 21: mod_base = OTHER; note = 2'-O-methyladenosine
gcctacatgttatctccaaaa

SEQ ID NO: 2101 - RNA, 21 nt, synthetic construct
  source 1..21: mol_type = other RNA
  modified_base 1: mod_base = OTHER; note = 2'-O-methylcytidine-3'-phosphorothioate
  modified_base 2: mod_base = OTHER; note = 2'-O-methyladenosine-3'-phosphorothioate
  modified_base 3: mod_base = OTHER; note = 2'-O-methyluridine-3'-phosphate
  modified_base 4: mod_base = OTHER; note = 2'-O-methylguanosine-3'-phosphate
  modified_base 5: mod_base = OTHER; note = 2'-O-methyluridine-3'-phosphate
  modified_base 6: mod_base = OTHER; note = 2'-O-hexadecyl-uridine-3'-phosphate
  modified_base 7: mod_base = OTHER; note = 2'-deoxy-2'-fluoroadenosine-3'-phosphate
  modified_base 8: mod_base = OTHER; note = 2'-O-methyluridine-3'-phosphate
  modified_base 9: mod_base = OTHER; note = 2'-deoxy-2'-fluorocytidine-3'-phosphate
  modified_base 10: mod_base = OTHER; note = 2'-deoxy-2'-fluorouridine-3'-phosphate
  modified_base 11: mod_base = OTHER; note = 2'-deoxy-2'-fluorocytidine-3'-phosphate
  modified_base 12: mod_base = OTHER; note = 2'-O-methylcytidine-3'-phosphate
  modified_base 13: mod_base = OTHER; note = 2'-O-methyladenosine-3'-phosphate
  modified_base 14: mod_base = OTHER; note = 2'-O-methyladenosine-3'-phosphate
  modified_base 15: mod_base = OTHER; note = 2'-O-methyladenosine-3'-phosphate
  modified_base 16: mod_base = OTHER; note = 2'-O-methylguanosine-3'-phosphate
  modified_base 17: mod_base = OTHER; note = 2'-O-methylcytidine-3'-phosphate
  modified_base 18: mod_base = OTHER; note = 2'-O-methylcytidine-3'-phosphate
  modified_base 19: mod_base = OTHER; note = 2'-O-methyladenosine-3'-phosphorothioate
  modified_base 20: mod_base = OTHER; note = 2'-O-methylcytidine-3'-phosphorothioate
  modified_base 21: mod_base = OTHER; note = 2'-O-methyladenosine
catgttatctccaaagccaca

SEQ ID NO: 2102 - RNA, 21 nt, synthetic construct
  source 1..21: mol_type = other RNA
  modified_base 1: mod_base = OTHER; note = 2'-O-methyluridine-3'-phosphorothioate
  modified_base 2: mod_base = OTHER; note = 2'-O-methylcytidine-3'-phosphorothioate
  modified_base 3: mod_base = OTHER; note = 2'-O-methylcytidine-3'-phosphate
  modified_base 4: mod_base = OTHER; note = 2'-O-methyladenosine-3'-phosphate
  modified_base 5: mod_base = OTHER; note = 2'-O-methyladenosine-3'-phosphate
  modified_base 6: mod_base = OTHER; note = 2'-O-hexadecyl-adenosine-3'-phosphate
  modified_base 7: mod_base = OTHER; note = 2'-deoxy-2'-fluoroguanosine-3'-phosphate
  modified_base 8: mod_base = OTHER; note = 2'-O-methylcytidine-3'-phosphate
  modified_base 9: mod_base = OTHER; note = 2'-deoxy-2'-fluorocytidine-3'-phosphate
  modified_base 10: mod_base = OTHER; note = 2'-deoxy-2'-fluoroadenosine-3'-phosphate
  modified_base 11: mod_base = OTHER; note = 2'-deoxy-2'-fluorocytidine-3'-phosphate
  modified_base 12: mod_base = OTHER; note = 2'-O-methyladenosine-3'-phosphate
  modified_base 13: mod_base = OTHER; note = 2'-O-methylguanosine-3'-phosphate
  modified_base 14: mod_base = OTHER; note = 2'-O-methyladenosine-3'-phosphate
  modified_base 15: mod_base = OTHER; note = 2'-O-methyladenosine-3'-phosphate
  modified_base 16: mod_base = OTHER; note = 2'-O-methylguanosine-3'-phosphate
  modified_base 17: mod_base = OTHER; note = 2'-O-methyladenosine-3'-phosphate
  modified_base 18: mod_base = OTHER; note = 2'-O-methyladenosine-3'-phosphate
  modified_base 19: mod_base = OTHER; note = 2'-O-methyladenosine-3'-phosphorothioate
  modified_base 20: mod_base = OTHER; note = 2'-O-methyluridine-3'-phosphorothioate
  modified_base 21: mod_base = OTHER; note = 2'-O-methyladenosine
tccaaagccacagaagaaata

SEQ ID NO: 2103 - RNA, 21 nt, synthetic construct
  source 1..21: mol_type = other RNA
  modified_base 1: mod_base = OTHER; note = 2'-O-methyladenosine-3'-phosphorothioate
  modified_base 2: mod_base = OTHER; note = 2'-O-methylguanosine-3'-phosphorothioate
  modified_base 3: mod_base = OTHER; note = 2'-O-methylcytidine-3'-phosphate
  modified_base 4: mod_base = OTHER; note = 2'-O-methylcytidine-3'-phosphate
  modified_base 5: mod_base = OTHER; note = 2'-O-methyladenosine-3'-phosphate
  modified_base 6: mod_base = OTHER; note = 2'-O-hexadecyl-cytidine-3'-phosphate
  modified_base 7: mod_base = OTHER; note = 2'-deoxy-2'-fluoroadenosine-3'-phosphate
  modified_base 8: mod_base = OTHER; note = 2'-O-methylguanosine-3'-phosphate
  modified_base 9: mod_base = OTHER; note = 2'-deoxy-2'-fluoroadenosine-3'-phosphate
  modified_base 10: mod_base = OTHER; note = 2'-deoxy-2'-fluoroadenosine-3'-phosphate
  modified_base 11: mod_base = OTHER; note = 2'-deoxy-2'-fluoroguanosine-3'-phosphate
  modified_base 12: mod_base = OTHER; note = 2'-O-methyladenosine-3'-phosphate
  modified_base 13: mod_base = OTHER; note = 2'-O-methyladenosine-3'-phosphate
  modified_base 14: mod_base = OTHER; note = 2'-O-methyladenosine-3'-phosphate
  modified_base 15: mod_base = OTHER; note = 2'-O-methyluridine-3'-phosphate
  modified_base 16: mod_base = OTHER; note = 2'-O-methyluridine-3'-phosphate
  modified_base 17: mod_base = OTHER; note = 2'-O-methyluridine-3'-phosphate
  modified_base 18: mod_base = OTHER; note = 2'-O-methylguanosine-3'-phosphate
  modified_base 19: mod_base = OTHER; note = 2'-O-methyluridine-3'-phosphorothioate
  modified_base 20: mod_base = OTHER; note = 2'-O-methylguanosine-3'-phosphorothioate
  modified_base 21: mod_base = OTHER; note = 2'-O-methyladenosine
agccacagaagaaatttgtga

SEQ ID NO: 2104 - RNA, 21 nt, synthetic construct
  source 1..21: mol_type = other RNA
  modified_base 1: mod_base = OTHER; note = 2'-O-methylcytidine-3'-phosphorothioate
  modified_base 2: mod_base = OTHER; note = 2'-O-methyladenosine-3'-phosphorothioate
  modified_base 3: mod_base = OTHER; note = 2'-O-methylguanosine-3'-phosphate
  modified_base 4: mod_base = OTHER; note = 2'-O-methyladenosine-3'-phosphate
  modified_base 5: mod_base = OTHER; note = 2'-O-methyladenosine-3'-phosphate
  modified_base 6: mod_base = OTHER; note = 2'-O-hexadecyl-guanosine-3'-phosphate
  modified_base 7: mod_base = OTHER; note = 2'-deoxy-2'-fluoroadenosine-3'-phosphate
  modified_base 8: mod_base = OTHER; note = 2'-O-methyladenosine-3'-phosphate
  modified_base 9: mod_base = OTHER; note = 2'-deoxy-2'-fluoroadenosine-3'-phosphate
  modified_base 10: mod_base = OTHER; note = 2'-deoxy-2'-fluorouridine-3'-phosphate
  modified_base 11: mod_base = OTHER; note = 2'-deoxy-2'-fluorouridine-3'-phosphate
  modified_base 12: mod_base = OTHER; note = 2'-O-methyluridine-3'-phosphate
  modified_base 13: mod_base = OTHER; note = 2'-O-methylguanosine-3'-phosphate
  modified_base 14: mod_base = OTHER; note = 2'-O-methyluridine-3'-phosphate
  modified_base 15: mod_base = OTHER; note = 2'-O-methylguanosine-3'-phosphate
  modified_base 16: mod_base = OTHER; note = 2'-O-methylguanosine-3'-phosphate
  modified_base 17: mod_base = OTHER; note = 2'-O-methyladenosine-3'-phosphate
  modified_base 18: mod_base = OTHER; note = 2'-O-methylcytidine-3'-phosphate
  modified_base 19: mod_base = OTHER; note = 2'-O-methylcytidine-3'-phosphorothioate
  modified_base 20: mod_base = OTHER; note = 2'-O-methyladenosine-3'-phosphorothioate
  modified_base 21: mod_base = OTHER; note = 2'-O-methyladenosine
cagaagaaatttgtggaccaa

SEQ ID NO: 2105 - RNA, 21 nt, synthetic construct
  source 1..21: mol_type = other RNA
  modified_base 1: mod_base = OTHER; note = 2'-O-methylguanosine-3'-phosphorothioate
  modified_base 2: mod_base = OTHER; note = 2'-O-methyladenosine-3'-phosphorothioate
  modified_base 3: mod_base = OTHER; note = 2'-O-methyladenosine-3'-phosphate
  modified_base 4: mod_base = OTHER; note = 2'-O-methyladenosine-3'-phosphate
  modified_base 5: mod_base = OTHER; note = 2'-O-methyluridine-3'-phosphate
  modified_base 6: mod_base = OTHER; note = 2'-O-hexadecyl-uridine-3'-phosphate
  modified_base 7: mod_base = OTHER; note = 2'-deoxy-2'-fluorouridine-3'-phosphate
  modified_base 8: mod_base = OTHER; note = 2'-O-methylguanosine-3'-phosphate
  modified_base 9: mod_base = OTHER; note = 2'-deoxy-2'-fluorouridine-3'-phosphate
  modified_base 10: mod_base = OTHER; note = 2'-deoxy-2'-fluoroguanosine-3'-phosphate
  modified_base 11: mod_base = OTHER; note = 2'-deoxy-2'-fluoroguanosine-3'-phosphate
  modified_base 12: mod_base = OTHER; note = 2'-O-methyladenosine-3'-phosphate
  modified_base 13: mod_base = OTHER; note = 2'-O-methylcytidine-3'-phosphate
  modified_base 14: mod_base = OTHER; note = 2'-O-methylcytidine-3'-phosphate
  modified_base 15: mod_base = OTHER; note = 2'-O-methyladenosine-3'-phosphate
  modified_base 16: mod_base = OTHER; note = 2'-O-methylguanosine-3'-phosphate
  modified_base 17: mod_base = OTHER; note = 2'-O-methylguanosine-3'-phosphate
  modified_base 18: mod_base = OTHER; note = 2'-O-methylcytidine-3'-phosphate
  modified_base 19: mod_base = OTHER; note = 2'-O-methyluridine-3'-phosphorothioate
  modified_base 20: mod_base = OTHER; note = 2'-O-methyluridine-3'-phosphorothioate
  modified_base 21: mod_base = OTHER; note = 2'-O-methyladenosine
gaaatttgtggaccaggctta

SEQ ID NO: 2106 - RNA, 21 nt, synthetic construct
  source 1..21: mol_type = other RNA
  modified_base 1: mod_base = OTHER; note = 2'-O-methyladenosine-3'-phosphorothioate
  modified_base 2: mod_base = OTHER; note = 2'-O-methylcytidine-3'-phosphorothioate
  modified_base 3: mod_base = OTHER; note = 2'-O-methylcytidine-3'-phosphate
  modified_base 4: mod_base = OTHER; note = 2'-O-methyladenosine-3'-phosphate
  modified_base 5: mod_base = OTHER; note = 2'-O-methylguanosine-3'-phosphate
  modified_base 6: mod_base = OTHER; note = 2'-O-hexadecyl-guanosine-3'-phosphate
  modified_base 7: mod_base = OTHER; note = 2'-deoxy-2'-fluorocytidine-3'-phosphate
  modified_base 8: mod_base = OTHER; note = 2'-O-methyluridine-3'-phosphate
  modified_base 9: mod_base = OTHER; note = 2'-deoxy-2'-fluorouridine-3'-phosphate
  modified_base 10: mod_base = OTHER; note = 2'-deoxy-2'-fluoroguanosine-3'-phosphate
  modified_base 11: mod_base = OTHER; note = 2'-deoxy-2'-fluorouridine-3'-phosphate
  modified_base 12: mod_base = OTHER; note = 2'-O-methylguanosine-3'-phosphate
  modified_base 13: mod_base = OTHER; note = 2'-O-methylguanosine-3'-phosphate
  modified_base 14: mod_base = OTHER; note = 2'-O-methylcytidine-3'-phosphate
  modified_base 15: mod_base = OTHER; note = 2'-O-methylcytidine-3'-phosphate
  modified_base 16: mod_base = OTHER; note = 2'-O-methylcytidine-3'-phosphate
  modified_base 17: mod_base = OTHER; note = 2'-O-methyladenosine-3'-phosphate
  modified_base 18: mod_base = OTHER; note = 2'-O-methyladenosine-3'-phosphate
  modified_base 19: mod_base = OTHER; note = 2'-O-methylguanosine-3'-phosphorothioate
  modified_base 20: mod_base = OTHER; note = 2'-O-methyluridine-3'-phosphorothioate
  modified_base 21: mod_base = OTHER; note = 2'-O-methyladenosine
accaggcttgtggcccaagta

SEQ ID NO: 2107 - RNA, 21 nt, synthetic construct
  source 1..21: mol_type = other RNA
  modified_base 1: mod_base = OTHER; note = 2'-O-methyluridine-3'-phosphorothioate
  modified_base 2: mod_base = OTHER; note = 2'-O-methylguanosine-3'-phosphorothioate
  modified_base 3: mod_base = OTHER; note = 2'-O-methyluridine-3'-phosphate
  modified_base 4: mod_base = OTHER; note = 2'-O-methylguanosine-3'-phosphate
  modified_base 5: mod_base = OTHER; note = 2'-O-methylguanosine-3'-phosphate
  modified_base 6: mod_base = OTHER; note = 2'-O-hexadecyl-cytidine-3'-phosphate
  modified_base 7: mod_base = OTHER; note = 2'-deoxy-2'-fluorocytidine-3'-phosphate
  modified_base 8: mod_base = OTHER; note = 2'-O-methylcytidine-3'-phosphate
  modified_base 9: mod_base = OTHER; note = 2'-deoxy-2'-fluoroadenosine-3'-phosphate
  modified_base 10: mod_base = OTHER; note = 2'-deoxy-2'-fluoroadenosine-3'-phosphate
  modified_base 11: mod_base = OTHER; note = 2'-deoxy-2'-fluoroguanosine-3'-phosphate
  modified_base 12: mod_base = OTHER; note = 2'-O-methyluridine-3'-phosphate
  modified_base 13: mod_base = OTHER; note = 2'-O-methylcytidine-3'-phosphate
  modified_base 14: mod_base = OTHER; note = 2'-O-methyladenosine-3'-phosphate
  modified_base 15: mod_base = OTHER; note = 2'-O-methyluridine-3'-phosphate
  modified_base 16: mod_base = OTHER; note = 2'-O-methyluridine-3'-phosphate
  modified_base 17: mod_base = OTHER; note = 2'-O-methylcytidine-3'-phosphate
  modified_base 18: mod_base = OTHER; note = 2'-O-methyladenosine-3'-phosphate
  modified_base 19: mod_base = OTHER; note = 2'-O-methyladenosine-3'-phosphorothioate
  modified_base 20: mod_base = OTHER; note = 2'-O-methyladenosine-3'-phosphorothioate
  modified_base 21: mod_base = OTHER; note = 2'-O-methyladenosine
tgtggcccaagtcattcaaaa

SEQ ID NO: 2108 - RNA, 21 nt, synthetic construct
  source 1..21: mol_type = other RNA
  modified_base 1: mod_base = OTHER; note = 2'-O-methylcytidine-3'-phosphorothioate
  modified_base 2: mod_base = OTHER; note = 2'-O-methylcytidine-3'-phosphorothioate
  modified_base 3: mod_base = OTHER; note = 2'-O-methylcytidine-3'-phosphate
  modified_base 4: mod_base = OTHER; note = 2'-O-methyladenosine-3'-phosphate
  modified_base 5: mod_base = OTHER; note = 2'-O-methyladenosine-3'-phosphate
  modified_base 6: mod_base = OTHER; note = 2'-O-hexadecyl-guanosine-3'-phosphate
  modified_base 7: mod_base = OTHER; note = 2'-deoxy-2'-fluorouridine-3'-phosphate
  modified_base 8: mod_base = OTHER; note = 2'-O-methylcytidine-3'-phosphate
  modified_base 9: mod_base = OTHER; note = 2'-deoxy-2'-fluoroadenosine-3'-phosphate
  modified_base 10: mod_base = OTHER; note = 2'-deoxy-2'-fluorouridine-3'-phosphate
  modified_base 11: mod_base = OTHER; note = 2'-deoxy-2'-fluorouridine-3'-phosphate
  modified_base 12: mod_base = OTHER; note = 2'-O-methylcytidine-3'-phosphate
  modified_base 13: mod_base = OTHER; note = 2'-O-methyladenosine-3'-phosphate
  modified_base 14: mod_base = OTHER; note = 2'-O-methyladenosine-3'-phosphate
  modified_base 15: mod_base = OTHER; note = 2'-O-methyladenosine-3'-phosphate
  modified_base 16: mod_base = OTHER; note = 2'-O-methyladenosine-3'-phosphate
  modified_base 17: mod_base = OTHER; note = 2'-O-methylguanosine-3'-phosphate
  modified_base 18: mod_base = OTHER; note = 2'-O-methyladenosine-3'-phosphate
  modified_base 19: mod_base = OTHER; note = 2'-O-methyladenosine-3'-phosphorothioate
  modified_base 20: mod_base = OTHER; note = 2'-O-methyladenosine-3'-phosphorothioate
  modified_base 21: mod_base = OTHER; note = 2'-O-methyladenosine
cccaagtcattcaaaagaaaa

SEQ ID NO: 2109 - RNA, 21 nt, synthetic construct
  source 1..21: mol_type = other RNA
  modified_base 1: mod_base = OTHER; note = 2'-O-methylcytidine-3'-phosphorothioate
  modified_base 2: mod_base = OTHER; note = 2'-O-methyladenosine-3'-phosphorothioate
  modified_base 3: mod_base = OTHER; note = 2'-O-methyluridine-3'-phosphate
  modified_base 4: mod_base = OTHER; note = 2'-O-methyluridine-3'-phosphate
  modified_base 5: mod_base = OTHER; note = 2'-O-methylcytidine-3'-phosphate
  modified_base 6: mod_base = OTHER; note = 2'-O-hexadecyl-adenosine-3'-phosphate
  modified_base 7: mod_base = OTHER; note = 2'-deoxy-2'-fluoroadenosine-3'-phosphate
  modified_base 8: mod_base = OTHER; note = 2'-O-methyladenosine-3'-phosphate
  modified_base 9: mod_base = OTHER; note = 2'-deoxy-2'-fluoroadenosine-3'-phosphate
  modified_base 10: mod_base = OTHER; note = 2'-deoxy-2'-fluoroguanosine-3'-phosphate
  modified_base 11: mod_base = OTHER; note = 2'-deoxy-2'-fluoroadenosine-3'-phosphate
  modified_base 12: mod_base = OTHER; note = 2'-O-methyladenosine-3'-phosphate
  modified_base 13: mod_base = OTHER; note = 2'-O-methyladenosine-3'-phosphate
  modified_base 14: mod_base = OTHER; note = 2'-O-methylguanosine-3'-phosphate
  modified_base 15: mod_base = OTHER; note = 2'-O-methyluridine-3'-phosphate
  modified_base 16: mod_base = OTHER; note = 2'-O-methyladenosine-3'-phosphate
  modified_base 17: mod_base = OTHER; note = 2'-O-methyluridine-3'-phosphate
  modified_base 18: mod_base = OTHER; note = 2'-O-methylguanosine-3'-phosphate
  modified_base 19: mod_base = OTHER; note = 2'-O-methylguanosine-3'-phosphorothioate
  modified_base 20: mod_base = OTHER; note = 2'-O-methyluridine-3'-phosphorothioate
  modified_base 21: mod_base = OTHER; note = 2'-O-methyladenosine
cattcaaaagaaagtatggta

SEQ ID NO: 2110 - RNA, 21 nt, synthetic construct
  source 1..21: mol_type = other RNA
  modified_base 1: mod_base = OTHER; note = 2'-O-methyladenosine-3'-phosphorothioate
  modified_base 2: mod_base = OTHER; note = 2'-O-methyladenosine-3'-phosphorothioate
  modified_base 3: mod_base = OTHER; note = 2'-O-methyladenosine-3'-phosphate
  modified_base 4: mod_base = OTHER; note = 2'-O-methyladenosine-3'-phosphate
  modified_base 5: mod_base = OTHER; note = 2'-O-methylguanosine-3'-phosphate
  modified_base 6: mod_base = OTHER; note = 2'-O-hexadecyl-adenosine-3'-phosphate
  modified_base 7: mod_base = OTHER; note = 2'-deoxy-2'-fluoroadenosine-3'-phosphate
  modified_base 8: mod_base = OTHER; note = 2'-O-methyladenosine-3'-phosphate
  modified_base 9: mod_base = OTHER; note = 2'-deoxy-2'-fluoroguanosine-3'-phosphate
  modified_base 10: mod_base = OTHER; note = 2'-deoxy-2'-fluorouridine-3'-phosphate
  modified_base 11: mod_base = OTHER; note = 2'-deoxy-2'-fluoroadenosine-3'-phosphate
  modified_base 12: mod_base = OTHER; note = 2'-O-methyluridine-3'-phosphate
  modified_base 13: mod_base = OTHER; note = 2'-O-methylguanosine-3'-phosphate
  modified_base 14: mod_base = OTHER; note = 2'-O-methylguanosine-3'-phosphate
  modified_base 15: mod_base = OTHER; note = 2'-O-methyluridine-3'-phosphate
  modified_base 16: mod_base = OTHER; note = 2'-O-methylguanosine-3'-phosphate
  modified_base 17: mod_base = OTHER; note = 2'-O-methyladenosine-3'-phosphate
  modified_base 18: mod_base = OTHER; note = 2'-O-methylguanosine-3'-phosphate
  modified_base 19: mod_base = OTHER; note = 2'-O-methyluridine-3'-phosphorothioate
  modified_base 20: mod_base = OTHER; note = 2'-O-methylcytidine-3'-phosphorothioate
  modified_base 21: mod_base = OTHER; note = 2'-O-methyladenosine
aaaagaaagtatggtgagtca

SEQ ID NO: 2111 - RNA, 21 nt, synthetic construct
  source 1..21: mol_type = other RNA
  modified_base 1: mod_base = OTHER; note = 2'-O-methyladenosine-3'-phosphorothioate
  modified_base 2: mod_base = OTHER; note = 2'-O-methylguanosine-3'-phosphorothioate
  modified_base 3: mod_base = OTHER; note = 2'-O-methyluridine-3'-phosphate
  modified_base 4: mod_base = OTHER; note = 2'-O-methyladenosine-3'-phosphate
  modified_base 5: mod_base = OTHER; note = 2'-O-methyluridine-3'-phosphate
  modified_base 6: mod_base = OTHER; note = 2'-O-hexadecyl-guanosine-3'-phosphate
  modified_base 7: mod_base = OTHER; note = 2'-deoxy-2'-fluoroguanosine-3'-phosphate
  modified_base 8: mod_base = OTHER; note = 2'-O-methyluridine-3'-phosphate
  modified_base 9: mod_base = OTHER; note = 2'-deoxy-2'-fluoroguanosine-3'-phosphate
  modified_base 10: mod_base = OTHER; note = 2'-deoxy-2'-fluoroadenosine-3'-phosphate
  modified_base 11: mod_base = OTHER; note = 2'-deoxy-2'-fluoroguanosine-3'-phosphate
  modified_base 12: mod_base = OTHER; note = 2'-O-methyluridine-3'-phosphate
  modified_base 13: mod_base = OTHER; note = 2'-O-methylcytidine-3'-phosphate
  modified_base 14: mod_base = OTHER; note = 2'-O-methylcytidine-3'-phosphate
  modified_base 15: mod_base = OTHER; note = 2'-O-methylcytidine-3'-phosphate
  modified_base 16: mod_base = OTHER; note = 2'-O-methyladenosine-3'-phosphate
  modified_base 17: mod_base = OTHER; note = 2'-O-methyladenosine-3'-phosphate
  modified_base 18: mod_base = OTHER; note = 2'-O-methylguanosine-3'-phosphate
  modified_base 19: mod_base = OTHER; note = 2'-O-methyladenosine-3'-phosphorothioate
  modified_base 20: mod_base = OTHER; note = 2'-O-methyluridine-3'-phosphorothioate
  modified_base 21: mod_base = OTHER; note = 2'-O-methyladenosine
agtatggtgagtcccaagata

SEQ ID NO: 2112 - RNA, 21 nt, synthetic construct
  source 1..21: mol_type = other RNA
  modified_base 1: mod_base = OTHER; note = 2'-O-methyluridine-3'-phosphorothioate
  modified_base 2: mod_base = OTHER; note = 2'-O-methylguanosine-3'-phosphorothioate
  modified_base 3: mod_base = OTHER; note = 2'-O-methyladenosine-3'-phosphate
  modified_base 4: mod_base = OTHER; note = 2'-O-methylguanosine-3'-phosphate
  modified_base 5: mod_base = OTHER; note = 2'-O-methyluridine-3'-phosphate
  modified_base 6: mod_base = OTHER; note = 2'-O-hexadecyl-cytidine-3'-phosphate
  modified_base 7: mod_base = OTHER; note = 2'-deoxy-2'-fluorocytidine-3'-phosphate
  modified_base 8: mod_base = OTHER; note = 2'-O-methylcytidine-3'-phosphate
  modified_base 9: mod_base = OTHER; note = 2'-deoxy-2'-fluoroadenosine-3'-phosphate
  modified_base 10: mod_base = OTHER; note = 2'-deoxy-2'-fluoroadenosine-3'-phosphate
  modified_base 11: mod_base = OTHER; note = 2'-deoxy-2'-fluoroguanosine-3'-phosphate
  modified_base 12: mod_base = OTHER; note = 2'-O-methyladenosine-3'-phosphate
  modified_base 13: mod_base = OTHER; note = 2'-O-methyluridine-3'-phosphate
  modified_base 14: mod_base = OTHER; note = 2'-O-methylcytidine-3'-phosphate
  modified_base 15: mod_base = OTHER; note = 2'-O-methyluridine-3'-phosphate
  modified_base 16: mod_base = OTHER; note = 2'-O-methylcytidine-3'-phosphate
  modified_base 17: mod_base = OTHER; note = 2'-O-methyluridine-3'-phosphate
  modified_base 18: mod_base = OTHER; note = 2'-O-methylguanosine-3'-phosphate
  modified_base 19: mod_base = OTHER; note = 2'-O-methylcytidine-3'-phosphorothioate
  modified_base 20: mod_base = OTHER; note = 2'-O-methyluridine-3'-phosphorothioate
  modified_base 21: mod_base = OTHER; note = 2'-O-methyladenosine
tgagtcccaagatctctgcta

SEQ ID NO: 2113 - RNA, 21 nt, synthetic construct
  source 1..21: mol_type = other RNA
  modified_base 1: mod_base = OTHER; note = 2'-O-methylcytidine-3'-phosphorothioate
  modified_base 2: mod_base = OTHER; note = 2'-O-methylcytidine-3'-phosphorothioate
  modified_base 3: mod_base = OTHER; note = 2'-O-methylcytidine-3'-phosphate
  modified_base 4: mod_base = OTHER; note = 2'-O-methyladenosine-3'-phosphate
  modified_base 5: mod_base = OTHER; note = 2'-O-methyladenosine-3'-phosphate
  modified_base 6: mod_base = OTHER; note = 2'-O-hexadecyl-guanosine-3'-phosphate
  modified_base 7: mod_base = OTHER; note = 2'-deoxy-2'-fluoroadenosine-3'-phosphate
  modified_base 8: mod_base = OTHER; note = 2'-O-methyluridine-3'-phosphate
  modified_base 9: mod_base = OTHER; note = 2'-deoxy-2'-fluorocytidine-3'-phosphate
  modified_base 10: mod_base = OTHER; note = 2'-deoxy-2'-fluorouridine-3'-phosphate
  modified_base 11: mod_base = OTHER; note = 2'-deoxy-2'-fluorocytidine-3'-phosphate
  modified_base 12: mod_base = OTHER; note = 2'-O-methyluridine-3'-phosphate
  modified_base 13: mod_base = OTHER; note = 2'-O-methylguanosine-3'-phosphate
  modified_base 14: mod_base = OTHER; note = 2'-O-methylcytidine-3'-phosphate
  modified_base 15: mod_base = OTHER; note = 2'-O-methyluridine-3'-phosphate
  modified_base 16: mod_base = OTHER; note = 2'-O-methylguanosine-3'-phosphate
  modified_base 17: mod_base = OTHER; note = 2'-O-methylguanosine-3'-phosphate
  modified_base 18: mod_base = OTHER; note = 2'-O-methyladenosine-3'-phosphate
  modified_base 19: mod_base = OTHER; note = 2'-O-methylcytidine-3'-phosphorothioate
  modified_base 20: mod_base = OTHER; note = 2'-O-methyladenosine-3'-phosphorothioate
  modified_base 21: mod_base = OTHER; note = 2'-O-methyladenosine
cccaagatctctgctggacaa

SEQ ID NO: 2114 - RNA, 21 nt, synthetic construct
  source 1..21: mol_type = other RNA
  modified_base 1: mod_base = OTHER; note = 2'-O-methylguanosine-3'-phosphorothioate
  modified_base 2: mod_base = OTHER; note = 2'-O-methyladenosine-3'-phosphorothioate
  modified_base 3: mod_base = OTHER; note = 2'-O-methyluridine-3'-phosphate
  modified_base 4: mod_base = OTHER; note = 2'-O-methylcytidine-3'-phosphate
  modified_base 5: mod_base = OTHER; note = 2'-O-methyluridine-3'-phosphate
  modified_base 6: mod_base = OTHER; note = 2'-O-hexadecyl-cytidine-3'-phosphate
  modified_base 7: mod_base = OTHER; note = 2'-deoxy-2'-fluorouridine-3'-phosphate
  modified_base 8: mod_base = OTHER; note = 2'-O-methylguanosine-3'-phosphate
  modified_base 9: mod_base = OTHER; note = 2'-deoxy-2'-fluorocytidine-3'-phosphate
  modified_base 10: mod_base = OTHER; note = 2'-deoxy-2'-fluorouridine-3'-phosphate
  modified_base 11: mod_base = OTHER; note = 2'-deoxy-2'-fluoroguanosine-3'-phosphate
  modified_base 12: mod_base = OTHER; note = 2'-O-methylguanosine-3'-phosphate
  modified_base 13: mod_base = OTHER; note = 2'-O-methyladenosine-3'-phosphate
  modified_base 14: mod_base = OTHER; note = 2'-O-methylcytidine-3'-phosphate
  modified_base 15: mod_base = OTHER; note = 2'-O-methyladenosine-3'-phosphate
  modified_base 16: mod_base = OTHER; note = 2'-O-methyluridine-3'-phosphate
  modified_base 17: mod_base = OTHER; note = 2'-O-methylcytidine-3'-phosphate
  modified_base 18: mod_base = OTHER; note = 2'-O-methyladenosine-3'-phosphate
  modified_base 19: mod_base = OTHER; note = 2'-O-methyladenosine-3'-phosphorothioate
  modified_base 20: mod_base = OTHER; note = 2'-O-methylcytidine-3'-phosphorothioate
  modified_base 21: mod_base = OTHER; note = 2'-O-methyladenosine
gatctctgctggacatcaaca

SEQ ID NO: 2115 - RNA, 21 nt, synthetic construct
  source 1..21: mol_type = other RNA
  modified_base 1: mod_base = OTHER; note = 2'-O-methylcytidine-3'-phosphorothioate
  modified_base 2: mod_base = OTHER; note = 2'-O-methyluridine-3'-phosphorothioate
  modified_base 3: mod_base = OTHER; note = 2'-O-methylguanosine-3'-phosphate
  modified_base 4: mod_base = OTHER; note = 2'-O-methylcytidine-3'-phosphate
  modified_base 5: mod_base = OTHER; note = 2'-O-methyluridine-3'-phosphate
  modified_base 6: mod_base = OTHER; note = 2'-O-hexadecyl-guanosine-3'-phosphate
  modified_base 7: mod_base = OTHER; note = 2'-deoxy-2'-fluoroguanosine-3'-phosphate
  modified_base 8: mod_base = OTHER; note = 2'-O-methyladenosine-3'-phosphate
  modified_base 9: mod_base = OTHER; note = 2'-deoxy-2'-fluorocytidine-3'-phosphate
  modified_base 10: mod_base = OTHER; note = 2'-deoxy-2'-fluoroadenosine-3'-phosphate
  modified_base 11: mod_base = OTHER; note = 2'-deoxy-2'-fluorouridine-3'-phosphate
  modified_base 12: mod_base = OTHER; note = 2'-O-methylcytidine-3'-phosphate
  modified_base 13: mod_base = OTHER; note = 2'-O-methyladenosine-3'-phosphate
  modified_base 14: mod_base = OTHER; note = 2'-O-methyladenosine-3'-phosphate
  modified_base 15: mod_base = OTHER; note = 2'-O-methylcytidine-3'-phosphate
  modified_base 16: mod_base = OTHER; note = 2'-O-methyladenosine-3'-phosphate
  modified_base 17: mod_base = OTHER; note = 2'-O-methylcytidine-3'-phosphate
  modified_base 18: mod_base = OTHER; note = 2'-O-methyluridine-3'-phosphate
  modified_base 19: mod_base = OTHER; note = 2'-O-methylguanosine-3'-phosphorothioate
  modified_base 20: mod_base = OTHER; note = 2'-O-methyluridine-3'-phosphorothioate
  modified_base 21: mod_base = OTHER; note = 2'-O-methyladenosine
ctgctggacatcaacactgta

SEQ ID NO: 2116 - RNA, 21 nt, synthetic construct
  source 1..21: mol_type = other RNA
  modified_base 1: mod_base = OTHER; note = 2'-O-methylguanosine-3'-phosphorothioate
  modified_base 2: mod_base = OTHER; note = 2'-O-methyladenosine-3'-phosphorothioate
  modified_base 3: mod_base = OTHER; note = 2'-O-methylcytidine-3'-phosphate
  modified_base 4: mod_base = OTHER; note = 2'-O-methyladenosine-3'-phosphate
  modified_base 5: mod_base = OTHER; note = 2'-O-methyluridine-3'-phosphate
  modified_base 6: mod_base = OTHER; note = 2'-O-hexadecyl-cytidine-3'-phosphate
  modified_base 7: mod_base = OTHER; note = 2'-deoxy-2'-fluoroadenosine-3'-phosphate
  modified_base 8: mod_base = OTHER; note = 2'-O-methyladenosine-3'-phosphate
  modified_base 9: mod_base = OTHER; note = 2'-deoxy-2'-fluorocytidine-3'-phosphate
  modified_base 10: mod_base = OTHER; note = 2'-deoxy-2'-fluoroadenosine-3'-phosphate
  modified_base 11: mod_base = OTHER; note = 2'-deoxy-2'-fluorocytidine-3'-phosphate
  modified_base 12: mod_base = OTHER; note = 2'-O-methyluridine-3'-phosphate
  modified_base 13: mod_base = OTHER; note = 2'-O-methylguanosine-3'-phosphate
  modified_base 14: mod_base = OTHER; note = 2'-O-methyluridine-3'-phosphate
  modified_base 15: mod_base = OTHER; note = 2'-O-methylguanosine-3'-phosphate
  modified_base 16: mod_base = OTHER; note = 2'-O-methylguanosine-3'-phosphate
  modified_base 17: mod_base = OTHER; note = 2'-O-methyluridine-3'-phosphate
  modified_base 18: mod_base = OTHER; note = 2'-O-methylcytidine-3'-phosphate
  modified_base 19: mod_base = OTHER; note = 2'-O-methyladenosine-3'-phosphorothioate
  modified_base 20: mod_base = OTHER; note = 2'-O-methylguanosine-3'-phosphorothioate
  modified_base 21: mod_base = OTHER; note = 2'-O-methyladenosine
gacatcaacactgtggtcaga

SEQ ID NO: 2117 - RNA, 21 nt, synthetic construct
  source 1..21: mol_type = other RNA
  modified_base 1: mod_base = OTHER; note = 2'-O-methyladenosine-3'-phosphorothioate
  modified_base 2: mod_base = OTHER; note = 2'-O-methylcytidine-3'-phosphorothioate
  modified_base 3: mod_base = OTHER; note = 2'-O-methyladenosine-3'-phosphate
  modified_base 4: mod_base = OTHER; note = 2'-O-methylcytidine-3'-phosphate
  modified_base 5: mod_base = OTHER; note = 2'-O-methyluridine-3'-phosphate
  modified_base 6: mod_base = OTHER; note = 2'-O-hexadecyl-guanosine-3'-phosphate
  modified_base 7: mod_base = OTHER; note = 2'-deoxy-2'-fluorouridine-3'-phosphate
  modified_base 8: mod_base = OTHER; note = 2'-O-methylguanosine-3'-phosphate
  modified_base 9: mod_base = OTHER; note = 2'-deoxy-2'-fluoroguanosine-3'-phosphate
  modified_base 10: mod_base = OTHER; note = 2'-deoxy-2'-fluorouridine-3'-phosphate
  modified_base 11: mod_base = OTHER; note = 2'-deoxy-2'-fluorocytidine-3'-phosphate
  modified_base 12: mod_base = OTHER; note = 2'-O-methyladenosine-3'-phosphate
  modified_base 13: mod_base = OTHER; note = 2'-O-methylguanosine-3'-phosphate
  modified_base 14: mod_base = OTHER; note = 2'-O-methyladenosine-3'-phosphate
  modified_base 15: mod_base = OTHER; note = 2'-O-methylguanosine-3'-phosphate
  modified_base 16: mod_base = OTHER; note = 2'-O-methylcytidine-3'-phosphate
  modified_base 17: mod_base = OTHER; note = 2'-O-methyladenosine-3'-phosphate
  modified_base 18: mod_base = OTHER; note = 2'-O-methylguanosine-3'-phosphate
  modified_base 19: mod_base = OTHER; note = 2'-O-methylcytidine-3'-phosphorothioate
  modified_base 20: mod_base = OTHER; note = 2'-O-methyluridine-3'-phosphorothioate
  modified_base 21: mod_base = OTHER; note = 2'-O-methyladenosine
acactgtggtcagagcagcta

SEQ ID NO: 2118 - RNA, 21 nt, synthetic construct
  source 1..21: mol_type = other RNA
  modified_base 1: mod_base = OTHER; note = 2'-O-methylcytidine-3'-phosphorothioate
  modified_base 2: mod_base = OTHER; note = 2'-O-methyladenosine-3'-phosphorothioate
  modified_base 3: mod_base = OTHER; note = 2'-O-methyladenosine-3'-phosphate
  modified_base 4: mod_base = OTHER; note = 2'-O-methylcytidine-3'-phosphate
  modified_base 5: mod_base = OTHER; note = 2'-O-methyladenosine-3'-phosphate
  modified_base 6: mod_base = OTHER; note = 2'-O-hexadecyl-cytidine-3'-phosphate
  modified_base 7: mod_base = OTHER; note = 2'-deoxy-2'-fluorouridine-3'-phosphate
  modified_base 8: mod_base = OTHER; note = 2'-O-methylcytidine-3'-phosphate
  modified_base 9: mod_base = OTHER; note = 2'-deoxy-2'-fluoroguanosine-3'-phosphate
  modified_base 10: mod_base = OTHER; note = 2'-deoxy-2'-fluoroguanosine-3'-phosphate
  modified_base 11: mod_base = OTHER; note = 2'-deoxy-2'-fluoroadenosine-3'-phosphate
  modified_base 12: mod_base = OTHER; note = 2'-O-methyluridine-3'-phosphate
  modified_base 13: mod_base = OTHER; note = 2'-O-methyluridine-3'-phosphate
  modified_base 14: mod_base = OTHER; note = 2'-O-methylguanosine-3'-phosphate
  modified_base 15: mod_base = OTHER; note = 2'-O-methyladenosine-3'-phosphate
  modified_base 16: mod_base = OTHER; note = 2'-O-methyladenosine-3'-phosphate
  modified_base 17: mod_base = OTHER; note = 2'-O-methylcytidine-3'-phosphate
  modified_base 18: mod_base = OTHER; note = 2'-O-methylcytidine-3'-phosphate
  modified_base 19: mod_base = OTHER; note = 2'-O-methyluridine-3'-phosphorothioate
  modified_base 20: mod_base = OTHER; note = 2'-O-methyluridine-3'-phosphorothioate
  modified_base 21: mod_base = OTHER; note = 2'-O-methyladenosine
caacactcggattgaacctta

SEQ ID NO: 2119 - RNA, 21 nt, synthetic construct
  source 1..21: mol_type = other RNA
  modified_base 1: mod_base = OTHER; note = 2'-O-methylcytidine-3'-phosphorothioate
  modified_base 2: mod_base = OTHER; note = 2'-O-methyluridine-3'-phosphorothioate
  modified_base 3: mod_base = OTHER; note = 2'-O-methylcytidine-3'-phosphate
  modified_base 4: mod_base = OTHER; note = 2'-O-methylguanosine-3'-phosphate
  modified_base 5: mod_base = OTHER; note = 2'-O-methylguanosine-3'-phosphate
  modified_base 6: mod_base = OTHER; note = 2'-O-hexadecyl-adenosine-3'-phosphate
  modified_base 7: mod_base = OTHER; note = 2'-deoxy-2'-fluorouridine-3'-phosphate
  modified_base 8: mod_base = OTHER; note = 2'-O-methyluridine-3'-phosphate
  modified_base 9: mod_base = OTHER; note = 2'-deoxy-2'-fluoroguanosine-3'-phosphate
  modified_base 10: mod_base = OTHER; note = 2'-deoxy-2'-fluoroadenosine-3'-phosphate
  modified_base 11: mod_base = OTHER; note = 2'-deoxy-2'-fluoroadenosine-3'-phosphate
  modified_base 12: mod_base = OTHER; note = 2'-O-methylcytidine-3'-phosphate
  modified_base 13: mod_base = OTHER; note = 2'-O-methylcytidine-3'-phosphate
  modified_base 14: mod_base = OTHER; note = 2'-O-methyluridine-3'-phosphate
  modified_base 15: mod_base = OTHER; note = 2'-O-methyluridine-3'-phosphate
  modified_base 16: mod_base = OTHER; note = 2'-O-methyladenosine-3'-phosphate
  modified_base 17: mod_base = OTHER; note = 2'-O-methylcytidine-3'-phosphate
  modified_base 18: mod_base = OTHER; note = 2'-O-methyluridine-3'-phosphate
  modified_base 19: mod_base = OTHER; note = 2'-O-methyladenosine-3'-phosphorothioate
  modified_base 20: mod_base = OTHER; note = 2'-O-methylcytidine-3'-phosphorothioate
  modified_base 21: mod_base = OTHER; note = 2'-O-methyladenosine
ctcggattgaaccttactaca

SEQ ID NO: 2120 - RNA, 21 nt, synthetic construct
  source 1..21: mol_type = other RNA
  modified_base 1: mod_base = OTHER; note = 2'-O-methyluridine-3'-phosphorothioate
  modified_base 2: mod_base = OTHER; note = 2'-O-methyluridine-3'-phosphorothioate
  modified_base 3: mod_base = OTHER; note = 2'-O-methylguanosine-3'-phosphate
  modified_base 4: mod_base = OTHER; note = 2'-O-methyladenosine-3'-phosphate
  modified_base 5: mod_base = OTHER; note = 2'-O-methyladenosine-3'-phosphate
  modified_base 6: mod_base = OTHER; note = 2'-O-hexadecyl-cytidine-3'-phosphate
  modified_base 7: mod_base = OTHER; note = 2'-deoxy-2'-fluorocytidine-3'-phosphate
  modified_base 8: mod_base = OTHER; note = 2'-O-methyluridine-3'-phosphate
  modified_base 9: mod_base = OTHER; note = 2'-deoxy-2'-fluorouridine-3'-phosphate
  modified_base 10: mod_base = OTHER; note = 2'-deoxy-2'-fluoroadenosine-3'-phosphate
  modified_base 11: mod_base = OTHER; note = 2'-deoxy-2'-fluorocytidine-3'-phosphate
  modified_base 12: mod_base = OTHER; note = 2'-O-methyluridine-3'-phosphate
  modified_base 13: mod_base = OTHER; note = 2'-O-methyladenosine-3'-phosphate
  modified_base 14: mod_base = OTHER; note = 2'-O-methylcytidine-3'-phosphate
  modified_base 15: mod_base = OTHER; note = 2'-O-methyladenosine-3'-phosphate
  modified_base 16: mod_base = OTHER; note = 2'-O-methylguanosine-3'-phosphate
  modified_base 17: mod_base = OTHER; note = 2'-O-methylcytidine-3'-phosphate
  modified_base 18: mod_base = OTHER; note = 2'-O-methyladenosine-3'-phosphate
  modified_base 19: mod_base = OTHER; note = 2'-O-methyluridine-3'-phosphorothioate
  modified_base 20: mod_base = OTHER; note = 2'-O-methylcytidine-3'-phosphorothioate
  modified_base 21: mod_base = OTHER; note = 2'-O-methyladenosine
ttgaaccttactacagcatca

SEQ ID NO: 2121 - RNA, 21 nt, synthetic construct
  source 1..21: mol_type = other RNA
  modified_base 1: mod_base = OTHER; note = 2'-O-methylcytidine-3'-phosphorothioate
  modified_base 2: mod_base = OTHER; note = 2'-O-methylcytidine-3'-phosphorothioate
  modified_base 3: mod_base = OTHER; note = 2'-O-methyluridine-3'-phosphate
  modified_base 4: mod_base = OTHER; note = 2'-O-methyluridine-3'-phosphate
  modified_base 5: mod_base = OTHER; note = 2'-O-methyladenosine-3'-phosphate
  modified_base 6: mod_base = OTHER; note = 2'-O-hexadecyl-cytidine-3'-phosphate
  modified_base 7: mod_base = OTHER; note = 2'-deoxy-2'-fluorouridine-3'-phosphate
  modified_base 8: mod_base = OTHER; note = 2'-O-methyladenosine-3'-phosphate
  modified_base 9: mod_base = OTHER; note = 2'-deoxy-2'-fluorocytidine-3'-phosphate
  modified_base 10: mod_base = OTHER; note = 2'-deoxy-2'-fluoroadenosine-3'-phosphate
  modified_base 11: mod_base = OTHER; note = 2'-deoxy-2'-fluoroguanosine-3'-phosphate
  modified_base 12: mod_base = OTHER; note = 2'-O-methylcytidine-3'-phosphate
  modified_base 13: mod_base = OTHER; note = 2'-O-methyladenosine-3'-phosphate
  modified_base 14: mod_base = OTHER; note = 2'-O-methyluridine-3'-phosphate
  modified_base 15: mod_base = OTHER; note = 2'-O-methylcytidine-3'-phosphate
  modified_base 16: mod_base = OTHER; note = 2'-O-methyluridine-3'-phosphate
  modified_base 17: mod_base = OTHER; note = 2'-O-methyladenosine-3'-phosphate
  modified_base 18: mod_base = OTHER; note = 2'-O-methyluridine-3'-phosphate
  modified_base 19: mod_base = OTHER; note = 2'-O-methyladenosine-3'-phosphorothioate
  modified_base 20: mod_base = OTHER; note = 2'-O-methyladenosine-3'-phosphorothioate
  modified_base 21: mod_base = OTHER; note = 2'-O-methyladenosine
ccttactacagcatctataaa

SEQ ID NO: 2122 - RNA, 21 nt, synthetic construct
  source 1..21: mol_type = other RNA
  modified_base 1: mod_base = OTHER; note = 2'-O-methylcytidine-3'-phosphorothioate
  modified_base 2: mod_base = OTHER; note = 2'-O-methyluridine-3'-phosphorothioate
  modified_base 3: mod_base = OTHER; note = 2'-O-methyladenosine-3'-phosphate
  modified_base 4: mod_base = OTHER; note = 2'-O-methylcytidine-3'-phosphate
  modified_base 5: mod_base = OTHER; note = 2'-O-methyladenosine-3'-phosphate
  modified_base 6: mod_base = OTHER; note = 2'-O-hexadecyl-guanosine-3'-phosphate
  modified_base 7: mod_base = OTHER; note = 2'-deoxy-2'-fluorocytidine-3'-phosphate
  modified_base 8: mod_base = OTHER; note = 2'-O-methyladenosine-3'-phosphate
  modified_base 9: mod_base = OTHER; note = 2'-deoxy-2'-fluorouridine-3'-phosphate
  modified_base 10: mod_base = OTHER; note = 2'-deoxy-2'-fluorocytidine-3'-phosphate
  modified_base 11: mod_base = OTHER; note = 2'-deoxy-2'-fluorouridine-3'-phosphate
  modified_base 12: mod_base = OTHER; note = 2'-O-methyladenosine-3'-phosphate
  modified_base 13: mod_base = OTHER; note = 2'-O-methyluridine-3'-phosphate
  modified_base 14: mod_base = OTHER; note = 2'-O-methyladenosine-3'-phosphate
  modified_base 15: mod_base = OTHER; note = 2'-O-methyladenosine-3'-phosphate
  modified_base 16: mod_base = OTHER; note = 2'-O-methylcytidine-3'-phosphate
  modified_base 17: mod_base = OTHER; note = 2'-O-methyladenosine-3'-phosphate
  modified_base 18: mod_base = OTHER; note = 2'-O-methylguanosine-3'-phosphate
  modified_base 19: mod_base = OTHER; note = 2'-O-methylcytidine-3'-phosphorothioate
  modified_base 20: mod_base = OTHER; note = 2'-O-methyladenosine-3'-phosphorothioate
  modified_base 21: mod_base = OTHER; note = 2'-O-methyladenosine
ctacagcatctataacagcaa

SEQ ID NO: 2123 - RNA, 21 nt, synthetic construct
  source 1..21: mol_type = other RNA
  modified_base 1: mod_base = OTHER; note = 2'-O-methylcytidine-3'-phosphorothioate
  modified_base 2: mod_base = OTHER; note = 2'-O-methyladenosine-3'-phosphorothioate
  modified_base 3: mod_base = OTHER; note = 2'-O-methyluridine-3'-phosphate
  modified_base 4: mod_base = OTHER; note = 2'-O-methylcytidine-3'-phosphate
  modified_base 5: mod_base = OTHER; note = 2'-O-methyluridine-3'-phosphate
  modified_base 6: mod_base = OTHER; note = 2'-O-hexadecyl-adenosine-3'-phosphate
  modified_base 7: mod_base = OTHER; note = 2'-deoxy-2'-fluorouridine-3'-phosphate
  modified_base 8: mod_base = OTHER; note = 2'-O-methyladenosine-3'-phosphate
  modified_base 9: mod_base = OTHER; note = 2'-deoxy-2'-fluoroadenosine-3'-phosphate
  modified_base 10: mod_base = OTHER; note = 2'-deoxy-2'-fluorocytidine-3'-phosphate
  modified_base 11: mod_base = OTHER; note = 2'-deoxy-2'-fluoroadenosine-3'-phosphate
  modified_base 12: mod_base = OTHER; note = 2'-O-methylguanosine-3'-phosphate
  modified_base 13: mod_base = OTHER; note = 2'-O-methylcytidine-3'-phosphate
  modified_base 14: mod_base = OTHER; note = 2'-O-methyladenosine-3'-phosphate
  modified_base 15: mod_base = OTHER; note = 2'-O-methylguanosine-3'-phosphate
  modified_base 16: mod_base = OTHER; note = 2'-O-methylcytidine-3'-phosphate
  modified_base 17: mod_base = OTHER; note = 2'-O-methylcytidine-3'-phosphate
  modified_base 18: mod_base = OTHER; note = 2'-O-methylcytidine-3'-phosphate
  modified_base 19: mod_base = OTHER; note = 2'-O-methyluridine-3'-phosphorothioate
  modified_base 20: mod_base = OTHER; note = 2'-O-methyluridine-3'-phosphorothioate
  modified_base 21: mod_base = OTHER; note = 2'-O-methyladenosine
catctataacagcagccctta

SEQ ID NO: 2124 - RNA, 21 nt, synthetic construct
  source 1..21: mol_type = other RNA
  modified_base 1: mod_base = OTHER; note = 2'-O-methylguanosine-3'-phosphorothioate
  modified_base 2: mod_base = OTHER; note = 2'-O-methyladenosine-3'-phosphorothioate
  modified_base 3: mod_base = OTHER; note = 2'-O-methylguanosine-3'-phosphate
  modified_base 4: mod_base = OTHER; note = 2'-O-methyladenosine-3'-phosphate
  modified_base 5: mod_base = OTHER; note = 2'-O-methylguanosine-3'-phosphate
  modified_base 6: mod_base = OTHER; note = 2'-O-hexadecyl-cytidine-3'-phosphate
  modified_base 7: mod_base = OTHER; note = 2'-deoxy-2'-fluoroadenosine-3'-phosphate
  modified_base 8: mod_base = OTHER; note = 2'-O-methylguanosine-3'-phosphate
  modified_base 9: mod_base = OTHER; note = 2'-deoxy-2'-fluorocytidine-3'-phosphate
  modified_base 10: mod_base = OTHER; note = 2'-deoxy-2'-fluorocytidine-3'-phosphate
  modified_base 11: mod_base = OTHER; note = 2'-deoxy-2'-fluorocytidine-3'-phosphate
  modified_base 12: mod_base = OTHER; note = 2'-O-methyladenosine-3'-phosphate
  modified_base 13: mod_base = OTHER; note = 2'-O-methyluridine-3'-phosphate
  modified_base 14: mod_base = OTHER; note = 2'-O-methylguanosine-3'-phosphate
  modified_base 15: mod_base = OTHER; note = 2'-O-methyluridine-3'-phosphate
  modified_base 16: mod_base = OTHER; note = 2'-O-methyladenosine-3'-phosphate
  modified_base 17: mod_base = OTHER; note = 2'-O-methyladenosine-3'-phosphate
  modified_base 18: mod_base = OTHER; note = 2'-O-methylcytidine-3'-phosphate
  modified_base 19: mod_base = OTHER; note = 2'-O-methyluridine-3'-phosphorothioate
  modified_base 20: mod_base = OTHER; note = 2'-O-methyluridine-3'-phosphorothioate
  modified_base 21: mod_base = OTHER; note = 2'-O-methyladenosine
gagagcagcccatgtaactta

SEQ ID NO: 2125 - RNA, 21 nt, synthetic construct
  source 1..21: mol_type = other RNA
  modified_base 1: mod_base = OTHER; note = 2'-O-methylcytidine-3'-phosphorothioate
  modified_base 2: mod_base = OTHER; note = 2'-O-methyladenosine-3'-phosphorothioate
  modified_base 3: mod_base = OTHER; note = 2'-O-methylguanosine-3'-phosphate
  modified_base 4: mod_base = OTHER; note = 2'-O-methylcytidine-3'-phosphate
  modified_base 5: mod_base = OTHER; note = 2'-O-methylcytidine-3'-phosphate
  modified_base 6: mod_base = OTHER; note = 2'-O-hexadecyl-cytidine-3'-phosphate
  modified_base 7: mod_base = OTHER; note = 2'-deoxy-2'-fluoroadenosine-3'-phosphate
  modified_base 8: mod_base = OTHER; note = 2'-O-methyluridine-3'-phosphate
  modified_base 9: mod_base = OTHER; note = 2'-deoxy-2'-fluoroguanosine-3'-phosphate
  modified_base 10: mod_base = OTHER; note = 2'-deoxy-2'-fluorouridine-3'-phosphate
  modified_base 11: mod_base = OTHER; note = 2'-deoxy-2'-fluoroadenosine-3'-phosphate
  modified_base 12: mod_base = OTHER; note = 2'-O-methyladenosine-3'-phosphate
  modified_base 13: mod_base = OTHER; note = 2'-O-methylcytidine-3'-phosphate
  modified_base 14: mod_base = OTHER; note = 2'-O-methyluridine-3'-phosphate
  modified_base 15: mod_base = OTHER; note = 2'-O-methyluridine-3'-phosphate
  modified_base 16: mod_base = OTHER; note = 2'-O-methyladenosine-3'-phosphate
  modified_base 17: mod_base = OTHER; note = 2'-O-methylcytidine-3'-phosphate
  modified_base 18: mod_base = OTHER; note = 2'-O-methyladenosine-3'-phosphate
  modified_base 19: mod_base = OTHER; note = 2'-O-methylguanosine-3'-phosphorothioate
  modified_base 20: mod_base = OTHER; note = 2'-O-methylcytidine-3'-phosphorothioate
  modified_base 21: mod_base = OTHER; note = 2'-O-methyladenosine
cagcccatgtaacttacagca

SEQ ID NO: 2126 - RNA, 21 nt, synthetic construct
  source 1..21: mol_type = other RNA
  modified_base 1: mod_base = OTHER; note = 2'-O-methyladenosine-3'-phosphorothioate
  modified_base 2: mod_base = OTHER; note = 2'-O-methyluridine-3'-phosphorothioate
  modified_base 3: mod_base = OTHER; note = 2'-O-methylguanosine-3'-phosphate
  modified_base 4: mod_base = OTHER; note = 2'-O-methyluridine-3'-phosphate
  modified_base 5: mod_base = OTHER; note = 2'-O-methyladenosine-3'-phosphate
  modified_base 6: mod_base = OTHER; note = 2'-O-hexadecyl-adenosine-3'-phosphate
  modified_base 7: mod_base = OTHER; note = 2'-deoxy-2'-fluorocytidine-3'-phosphate
  modified_base 8: mod_base = OTHER; note = 2'-O-methyluridine-3'-phosphate
  modified_base 9: mod_base = OTHER; note = 2'-deoxy-2'-fluorouridine-3'-phosphate
  modified_base 10: mod_base = OTHER; note = 2'-deoxy-2'-fluoroadenosine-3'-phosphate
  modified_base 11: mod_base = OTHER; note = 2'-deoxy-2'-fluorocytidine-3'-phosphate
  modified_base 12: mod_base = OTHER; note = 2'-O-methyladenosine-3'-phosphate
  modified_base 13: mod_base = OTHER; note = 2'-O-methylguanosine-3'-phosphate
  modified_base 14: mod_base = OTHER; note = 2'-O-methylcytidine-3'-phosphate
  modified_base 15: mod_base = OTHER; note = 2'-O-methylcytidine-3'-phosphate
  modified_base 16: mod_base = OTHER; note = 2'-O-methyladenosine-3'-phosphate
  modified_base 17: mod_base = OTHER; note = 2'-O-methylguanosine-3'-phosphate
  modified_base 18: mod_base = OTHER; note = 2'-O-methyluridine-3'-phosphate
  modified_base 19: mod_base = OTHER; note = 2'-O-methyladenosine-3'-phosphorothioate
  modified_base 20: mod_base = OTHER; note = 2'-O-methyladenosine-3'-phosphorothioate
  modified_base 21: mod_base = OTHER; note = 2'-O-methyladenosine
atgtaacttacagccagtaaa

SEQ ID NO: 2127 - RNA, 21 nt, synthetic construct
  source 1..21: mol_type = other RNA
  modified_base 1: mod_base = OTHER; note = 2'-O-methylcytidine-3'-phosphorothioate
  modified_base 2: mod_base = OTHER; note = 2'-O-methyluridine-3'-phosphorothioate
  modified_base 3: mod_base = OTHER; note = 2'-O-methyluridine-3'-phosphate
  modified_base 4: mod_base = OTHER; note = 2'-O-methyladenosine-3'-phosphate
  modified_base 5: mod_base = OTHER; note = 2'-O-methylcytidine-3'-phosphate
  modified_base 6: mod_base = OTHER; note = 2'-O-hexadecyl-adenosine-3'-phosphate
  modified_base 7: mod_base = OTHER; note = 2'-deoxy-2'-fluoroguanosine-3'-phosphate
  modified_base 8: mod_base = OTHER; note = 2'-O-methylcytidine-3'-phosphate
  modified_base 9: mod_base = OTHER; note = 2'-deoxy-2'-fluorocytidine-3'-phosphate
  modified_base 10: mod_base = OTHER; note = 2'-deoxy-2'-fluoroadenosine-3'-phosphate
  modified_base 11: mod_base = OTHER; note = 2'-deoxy-2'-fluoroguanosine-3'-phosphate
  modified_base 12: mod_base = OTHER; note = 2'-O-methyluridine-3'-phosphate
  modified_base 13: mod_base = OTHER; note = 2'-O-methyladenosine-3'-phosphate
  modified_base 14: mod_base = OTHER; note = 2'-O-methyladenosine-3'-phosphate
  modified_base 15: mod_base = OTHER; note = 2'-O-methyladenosine-3'-phosphate
  modified_base 16: mod_base = OTHER; note = 2'-O-methylcytidine-3'-phosphate
  modified_base 17: mod_base = OTHER; note = 2'-O-methyluridine-3'-phosphate
  modified_base 18: mod_base = OTHER; note = 2'-O-methylcytidine-3'-phosphate
  modified_base 19: mod_base = OTHER; note = 2'-O-methyluridine-3'-phosphorothioate
  modified_base 20: mod_base = OTHER; note = 2'-O-methyluridine-3'-phosphorothioate
  modified_base 21: mod_base = OTHER; note = 2'-O-methyladenosine
cttacagccagtaaactctta

SEQ ID NO: 2128 - RNA, 21 nt, synthetic construct
  source 1..21: mol_type = other RNA
  modified_base 1: mod_base = OTHER; note = 2'-O-methylcytidine-3'-phosphorothioate
  modified_base 2: mod_base = OTHER; note = 2'-O-methylcytidine-3'-phosphorothioate
  modified_base 3: mod_base = OTHER; note = 2'-O-methyladenosine-3'-phosphate
  modified_base 4: mod_base = OTHER; note = 2'-O-methylguanosine-3'-phosphate
  modified_base 5: mod_base = OTHER; note = 2'-O-methyluridine-3'-phosphate
  modified_base 6: mod_base = OTHER; note = 2'-O-hexadecyl-adenosine-3'-phosphate
  modified_base 7: mod_base = OTHER; note = 2'-deoxy-2'-fluoroadenosine-3'-phosphate
  modified_base 8: mod_base = OTHER; note = 2'-O-methyladenosine-3'-phosphate
  modified_base 9: mod_base = OTHER; note = 2'-deoxy-2'-fluorocytidine-3'-phosphate
  modified_base 10: mod_base = OTHER; note = 2'-deoxy-2'-fluorouridine-3'-phosphate
  modified_base 11: mod_base = OTHER; note = 2'-deoxy-2'-fluorocytidine-3'-phosphate
  modified_base 12: mod_base = OTHER; note = 2'-O-methyluridine-3'-phosphate
  modified_base 13: mod_base = OTHER; note = 2'-O-methyluridine-3'-phosphate
  modified_base 14: mod_base = OTHER; note = 2'-O-methyluridine-3'-phosphate
  modified_base 15: mod_base = OTHER; note = 2'-O-methyluridine-3'-phosphate
  modified_base 16: mod_base = OTHER; note = 2'-O-methylguanosine-3'-phosphate
  modified_base 17: mod_base = OTHER; note = 2'-O-methylguanosine-3'-phosphate
  modified_base 18: mod_base = OTHER; note = 2'-O-methyladenosine-3'-phosphate
  modified_base 19: mod_base = OTHER; note = 2'-O-methyluridine-3'-phosphorothioate
  modified_base 20: mod_base = OTHER; note = 2'-O-methyluridine-3'-phosphorothioate
  modified_base 21: mod_base = OTHER; note = 2'-O-methyladenosine
ccagtaaactcttttggatta

SEQ ID NO: 2129 - RNA, 21 nt, synthetic construct
  source 1..21: mol_type = other RNA
  modified_base 1: mod_base = OTHER; note = 2'-O-methyladenosine-3'-phosphorothioate
  modified_base 2: mod_base = OTHER; note = 2'-O-methylcytidine-3'-phosphorothioate
  modified_base 3: mod_base = OTHER; note = 2'-O-methyluridine-3'-phosphate
  modified_base 4: mod_base = OTHER; note = 2'-O-methylcytidine-3'-phosphate
  modified_base 5: mod_base = OTHER; note = 2'-O-methyluridine-3'-phosphate
  modified_base 6: mod_base = OTHER; note = 2'-O-hexadecyl-uridine-3'-phosphate
  modified_base 7: mod_base = OTHER; note = 2'-deoxy-2'-fluorouridine-3'-phosphate
  modified_base 8: mod_base = OTHER; note = 2'-O-methyluridine-3'-phosphate
  modified_base 9: mod_base = OTHER; note = 2'-deoxy-2'-fluoroguanosine-3'-phosphate
  modified_base 10: mod_base = OTHER; note = 2'-deoxy-2'-fluoroguanosine-3'-phosphate
  modified_base 11: mod_base = OTHER; note = 2'-deoxy-2'-fluoroadenosine-3'-phosphate
  modified_base 12: mod_base = OTHER; note = 2'-O-methyluridine-3'-phosphate
  modified_base 13: mod_base = OTHER; note = 2'-O-methyluridine-3'-phosphate
  modified_base 14: mod_base = OTHER; note = 2'-O-methyluridine-3'-phosphate
  modified_base 15: mod_base = OTHER; note = 2'-O-methylguanosine-3'-phosphate
  modified_base 16: mod_base = OTHER; note = 2'-O-methylcytidine-3'-phosphate
  modified_base 17: mod_base = OTHER; note = 2'-O-methylcytidine-3'-phosphate
  modified_base 18: mod_base = OTHER; note = 2'-O-methyladenosine-3'-phosphate
  modified_base 19: mod_base = OTHER; note = 2'-O-methyladenosine-3'-phosphorothioate
  modified_base 20: mod_base = OTHER; note = 2'-O-methyluridine-3'-phosphorothioate
  modified_base 21: mod_base = OTHER; note = 2'-O-methyladenosine
actcttttggatttgccaata

SEQ ID NO: 2130 - RNA, 21 nt, synthetic construct
  source 1..21: mol_type = other RNA
  modified_base 1: mod_base = OTHER; note = 2'-O-methylguanosine-3'-phosphorothioate
  modified_base 2: mod_base = OTHER; note = 2'-O-methyladenosine-3'-phosphorothioate
  modified_base 3: mod_base = OTHER; note = 2'-O-methyluridine-3'-phosphate
  modified_base 4: mod_base = OTHER; note = 2'-O-methyluridine-3'-phosphate
  modified_base 5: mod_base = OTHER; note = 2'-O-methyluridine-3'-phosphate
  modified_base 6: mod_base = OTHER; note = 2'-O-hexadecyl-guanosine-3'-phosphate
  modified_base 7: mod_base = OTHER; note = 2'-deoxy-2'-fluorocytidine-3'-phosphate
  modified_base 8: mod_base = OTHER; note = 2'-O-methylcytidine-3'-phosphate
  modified_base 9: mod_base = OTHER; note = 2'-deoxy-2'-fluoroadenosine-3'-phosphate
  modified_base 10: mod_base = OTHER; note = 2'-deoxy-2'-fluoroadenosine-3'-phosphate
  modified_base 11: mod_base = OTHER; note = 2'-deoxy-2'-fluorouridine-3'-phosphate
  modified_base 12: mod_base = OTHER; note = 2'-O-methyluridine-3'-phosphate
  modified_base 13: mod_base = OTHER; note = 2'-O-methylcytidine-3'-phosphate
  modified_base 14: mod_base = OTHER; note = 2'-O-methyladenosine-3'-phosphate
  modified_base 15: mod_base = OTHER; note = 2'-O-methyluridine-3'-phosphate
  modified_base 16: mod_base = OTHER; note = 2'-O-methyladenosine-3'-phosphate
  modified_base 17: mod_base = OTHER; note = 2'-O-methyluridine-3'-phosphate
  modified_base 18: mod_base = OTHER; note = 2'-O-methyladenosine-3'-phosphate
  modified_base 19: mod_base = OTHER; note = 2'-O-methyluridine-3'-phosphorothioate
  modified_base 20: mod_base = OTHER; note = 2'-O-methyluridine-3'-phosphorothioate
  modified_base 21: mod_base = OTHER; note = 2'-O-methyladenosine
gatttgccaattcatatatta

SEQ ID NO: 2131 - RNA, 21 nt, synthetic construct
  source 1..21: mol_type = other RNA
  modified_base 1: mod_base = OTHER; note = 2'-O-methyladenosine-3'-phosphorothioate
  modified_base 2: mod_base = OTHER; note = 2'-O-methyluridine-3'-phosphorothioate
  modified_base 3: mod_base = OTHER; note = 2'-O-methyluridine-3'-phosphate
  modified_base 4: mod_base = OTHER; note = 2'-O-methylcytidine-3'-phosphate
  modified_base 5: mod_base = OTHER; note = 2'-O-methyladenosine-3'-phosphate
  modified_base 6: mod_base = OTHER; note = 2'-O-hexadecyl-uridine-3'-phosphate
  modified_base 7: mod_base = OTHER; note = 2'-deoxy-2'-fluoroadenosine-3'-phosphate
  modified_base 8: mod_base = OTHER; note = 2'-O-methyluridine-3'-phosphate
  modified_base 9: mod_base = OTHER; note = 2'-deoxy-2'-fluoroadenosine-3'-phosphate
  modified_base 10: mod_base = OTHER; note = 2'-deoxy-2'-fluorouridine-3'-phosphate
  modified_base 11: mod_base = OTHER; note = 2'-deoxy-2'-fluorouridine-3'-phosphate
  modified_base 12: mod_base = OTHER; note = 2'-O-methylguanosine-3'-phosphate
  modified_base 13: mod_base = OTHER; note = 2'-O-methylcytidine-3'-phosphate
  modified_base 14: mod_base = OTHER; note = 2'-O-methylcytidine-3'-phosphate
  modified_base 15: mod_base = OTHER; note = 2'-O-methyladenosine-3'-phosphate
  modified_base 16: mod_base = OTHER; note = 2'-O-methyluridine-3'-phosphate
  modified_base 17: mod_base = OTHER; note = 2'-O-methylguanosine-3'-phosphate
  modified_base 18: mod_base = OTHER; note = 2'-O-methylcytidine-3'-phosphate
  modified_base 19: mod_base = OTHER; note = 2'-O-methyladenosine-3'-phosphorothioate
  modified_base 20: mod_base = OTHER; note = 2'-O-methyluridine-3'-phosphorothioate
  modified_base 21: mod_base = OTHER; note = 2'-O-methyladenosine
attcatatattgccatgcata

SEQ ID NO: 2132 - RNA, 21 nt, synthetic construct
  source 1..21: mol_type = other RNA
  modified_base 1: mod_base = OTHER; note = 2'-O-methyladenosine-3'-phosphorothioate
  modified_base 2: mod_base = OTHER; note = 2'-O-methyluridine-3'-phosphorothioate
  modified_base 3: mod_base = OTHER; note = 2'-O-methyladenosine-3'-phosphate
  modified_base 4: mod_base = OTHER; note = 2'-O-methyluridine-3'-phosphate
  modified_base 5: mod_base = OTHER; note = 2'-O-methyluridine-3'-phosphate
  modified_base 6: mod_base = OTHER; note = 2'-O-hexadecyl-guanosine-3'-phosphate
  modified_base 7: mod_base = OTHER; note = 2'-deoxy-2'-fluorocytidine-3'-phosphate
  modified_base 8: mod_base = OTHER; note = 2'-O-methylcytidine-3'-phosphate
  modified_base 9: mod_base = OTHER; note = 2'-deoxy-2'-fluoroadenosine-3'-phosphate
  modified_base 10: mod_base = OTHER; note = 2'-deoxy-2'-fluorouridine-3'-phosphate
  modified_base 11: mod_base = OTHER; note = 2'-deoxy-2'-fluoroguanosine-3'-phosphate
  modified_base 12: mod_base = OTHER; note = 2'-O-methylcytidine-3'-phosphate
  modified_base 13: mod_base = OTHER; note = 2'-O-methyladenosine-3'-phosphate
  modified_base 14: mod_base = OTHER; note = 2'-O-methyluridine-3'-phosphate
  modified_base 15: mod_base = OTHER; note = 2'-O-methyluridine-3'-phosphate
  modified_base 16: mod_base = OTHER; note = 2'-O-methyladenosine-3'-phosphate
  modified_base 17: mod_base = OTHER; note = 2'-O-methyluridine-3'-phosphate
  modified_base 18: mod_base = OTHER; note = 2'-O-methylcytidine-3'-phosphate
  modified_base 19: mod_base = OTHER; note = 2'-O-methyladenosine-3'-phosphorothioate
  modified_base 20: mod_base = OTHER; note = 2'-O-methylcytidine-3'-phosphorothioate
  modified_base 21: mod_base = OTHER; note = 2'-O-methyladenosine
atattgccatgcattatcaca

SEQ ID NO: 2133 - RNA, 21 nt, synthetic construct
  source 1..21: mol_type = other RNA
  modified_base 1: mod_base = OTHER; note = 2'-O-methyladenosine-3'-phosphorothioate
  modified_base 2: mod_base = OTHER; note = 2'-O-methyluridine-3'-phosphorothioate
  modified_base 3: mod_base = OTHER; note = 2'-O-methylguanosine-3'-phosphate
  modified_base 4: mod_base = OTHER; note = 2'-O-methylcytidine-3'-phosphate
  modified_base 5: mod_base = OTHER; note = 2'-O-methyladenosine-3'-phosphate
  modified_base 6: mod_base = OTHER; note = 2'-O-hexadecyl-uridine-3'-phosphate
  modified_base 7: mod_base = OTHER; note = 2'-deoxy-2'-fluorouridine-3'-phosphate
  modified_base 8: mod_base = OTHER; note = 2'-O-methyladenosine-3'-phosphate
  modified_base 9: mod_base = OTHER; note = 2'-deoxy-2'-fluorouridine-3'-phosphate
  modified_base 10: mod_base = OTHER; note = 2'-deoxy-2'-fluorocytidine-3'-phosphate
  modified_base 11: mod_base = OTHER; note = 2'-deoxy-2'-fluoroadenosine-3'-phosphate
  modified_base 12: mod_base = OTHER; note = 2'-O-methylcytidine-3'-phosphate
  modified_base 13: mod_base = OTHER; note = 2'-O-methyladenosine-3'-phosphate
  modified_base 14: mod_base = OTHER; note = 2'-O-methylcytidine-3'-phosphate
  modified_base 15: mod_base = OTHER; note = 2'-O-methylcytidine-3'-phosphate
  modified_base 16: mod_base = OTHER; note = 2'-O-methyladenosine-3'-phosphate
  modified_base 17: mod_base = OTHER; note = 2'-O-methylcytidine-3'-phosphate
  modified_base 18: mod_base = OTHER; note = 2'-O-methyluridine-3'-phosphate
  modified_base 19: mod_base = OTHER; note = 2'-O-methyladenosine-3'-phosphorothioate
  modified_base 20: mod_base = OTHER; note = 2'-O-methyladenosine-3'-phosphorothioate
  modified_base 21: mod_base = OTHER; note = 2'-O-methyladenosine
atgcattatcacaccactaaa

SEQ ID NO: 2134 - RNA, 21 nt, synthetic construct
  source 1..21: mol_type = other RNA
  modified_base 1: mod_base = OTHER; note = 2'-O-methyluridine-3'-phosphorothioate
  modified_base 2: mod_base = OTHER; note = 2'-O-methyladenosine-3'-phosphorothioate
  modified_base 3: mod_base = OTHER; note = 2'-O-methyluridine-3'-phosphate
  modified_base 4: mod_base = OTHER; note = 2'-O-methylcytidine-3'-phosphate
  modified_base 5: mod_base = OTHER; note = 2'-O-methyladenosine-3'-phosphate
  modified_base 6: mod_base = OTHER; note = 2'-O-hexadecyl-cytidine-3'-phosphate
  modified_base 7: mod_base = OTHER; note = 2'-deoxy-2'-fluoroadenosine-3'-phosphate
  modified_base 8: mod_base = OTHER; note = 2'-O-methylcytidine-3'-phosphate
  modified_base 9: mod_base = OTHER; note = 2'-deoxy-2'-fluorocytidine-3'-phosphate
  modified_base 10: mod_base = OTHER; note = 2'-deoxy-2'-fluoroadenosine-3'-phosphate
  modified_base 11: mod_base = OTHER; note = 2'-deoxy-2'-fluorocytidine-3'-phosphate
  modified_base 12: mod_base = OTHER; note = 2'-O-methyluridine-3'-phosphate
  modified_base 13: mod_base = OTHER; note = 2'-O-methyladenosine-3'-phosphate
  modified_base 14: mod_base = OTHER; note = 2'-O-methyladenosine-3'-phosphate
  modified_base 15: mod_base = OTHER; note = 2'-O-methyluridine-3'-phosphate
  modified_base 16: mod_base = OTHER; note = 2'-O-methylguanosine-3'-phosphate
  modified_base 17: mod_base = OTHER; note = 2'-O-methyladenosine-3'-phosphate
  modified_base 18: mod_base = OTHER; note = 2'-O-methylcytidine-3'-phosphate
  modified_base 19: mod_base = OTHER; note = 2'-O-methyluridine-3'-phosphorothioate
  modified_base 20: mod_base = OTHER; note = 2'-O-methyluridine-3'-phosphorothioate
  modified_base 21: mod_base = OTHER; note = 2'-O-methyladenosine
tatcacaccactaatgactta

SEQ ID NO: 2135 - RNA, 21 nt, synthetic construct
  source 1..21: mol_type = other RNA
  modified_base 1: mod_base = OTHER; note = 2'-O-methylcytidine-3'-phosphorothioate
  modified_base 2: mod_base = OTHER; note = 2'-O-methyladenosine-3'-phosphorothioate
  modified_base 3: mod_base = OTHER; note = 2'-O-methylcytidine-3'-phosphate
  modified_base 4: mod_base = OTHER; note = 2'-O-methylcytidine-3'-phosphate
  modified_base 5: mod_base = OTHER; note = 2'-O-methyladenosine-3'-phosphate
  modified_base 6: mod_base = OTHER; note = 2'-O-hexadecyl-cytidine-3'-phosphate
  modified_base 7: mod_base = OTHER; note = 2'-deoxy-2'-fluorouridine-3'-phosphate
  modified_base 8: mod_base = OTHER; note = 2'-O-methyladenosine-3'-phosphate
  modified_base 9: mod_base = OTHER; note = 2'-deoxy-2'-fluoroadenosine-3'-phosphate
  modified_base 10: mod_base = OTHER; note = 2'-deoxy-2'-fluorouridine-3'-phosphate
  modified_base 11: mod_base = OTHER; note = 2'-deoxy-2'-fluoroguanosine-3'-phosphate
  modified_base 12: mod_base = OTHER; note = 2'-O-methyladenosine-3'-phosphate
  modified_base 13: mod_base = OTHER; note = 2'-O-methylcytidine-3'-phosphate
  modified_base 14: mod_base = OTHER; note = 2'-O-methyluridine-3'-phosphate
  modified_base 15: mod_base = OTHER; note = 2'-O-methyluridine-3'-phosphate
  modified_base 16: mod_base = OTHER; note = 2'-O-methyladenosine-3'-phosphate
  modified_base 17: mod_base = OTHER; note = 2'-O-methylguanosine-3'-phosphate
  modified_base 18: mod_base = OTHER; note = 2'-O-methyluridine-3'-phosphate
  modified_base 19: mod_base = OTHER; note = 2'-O-methylguanosine-3'-phosphorothioate
  modified_base 20: mod_base = OTHER; note = 2'-O-methylcytidine-3'-phosphorothioate
  modified_base 21: mod_base = OTHER; note = 2'-O-methyladenosine
caccactaatgacttagtgca

SEQ ID NO: 2136 - RNA, 21 nt, synthetic construct
  source 1..21: mol_type = other RNA
  modified_base 1: mod_base = OTHER; note = 2'-O-methyladenosine-3'-phosphorothioate
  modified_base 2: mod_base = OTHER; note = 2'-O-methyladenosine-3'-phosphorothioate
  modified_base 3: mod_base = OTHER; note = 2'-O-methyluridine-3'-phosphate
  modified_base 4: mod_base = OTHER; note = 2'-O-methylguanosine-3'-phosphate
  modified_base 5: mod_base = OTHER; note = 2'-O-methyladenosine-3'-phosphate
  modified_base 6: mod_base = OTHER; note = 2'-O-hexadecyl-cytidine-3'-phosphate
  modified_base 7: mod_base = OTHER; note = 2'-deoxy-2'-fluorouridine-3'-phosphate
  modified_base 8: mod_base = OTHER; note = 2'-O-methyluridine-3'-phosphate
  modified_base 9: mod_base = OTHER; note = 2'-deoxy-2'-fluoroadenosine-3'-phosphate
  modified_base 10: mod_base = OTHER; note = 2'-deoxy-2'-fluoroguanosine-3'-phosphate
  modified_base 11: mod_base = OTHER; note = 2'-deoxy-2'-fluorouridine-3'-phosphate
  modified_base 12: mod_base = OTHER; note = 2'-O-methylguanosine-3'-phosphate
  modified_base 13: mod_base = OTHER; note = 2'-O-methylcytidine-3'-phosphate
  modified_base 14: mod_base = OTHER; note = 2'-O-methyladenosine-3'-phosphate
  modified_base 15: mod_base = OTHER; note = 2'-O-methylguanosine-3'-phosphate
  modified_base 16: mod_base = OTHER; note = 2'-O-methylguanosine-3'-phosphate
  modified_base 17: mod_base = OTHER; note = 2'-O-methyladenosine-3'-phosphate
  modified_base 18: mod_base = OTHER; note = 2'-O-methyladenosine-3'-phosphate
  modified_base 19: mod_base = OTHER; note = 2'-O-methyluridine-3'-phosphorothioate
  modified_base 20: mod_base = OTHER; note = 2'-O-methyladenosine-3'-phosphorothioate
  modified_base 21: mod_base = OTHER; note = 2'-O-methyladenosine
aatgacttagtgcaggaataa

SEQ ID NO: 2137 - RNA, 21 nt, synthetic construct
  source 1..21: mol_type = other RNA
  modified_base 1: mod_base = OTHER; note = 2'-O-methyluridine-3'-phosphorothioate
  modified_base 2: mod_base = OTHER; note = 2'-O-methyluridine-3'-phosphorothioate
  modified_base 3: mod_base = OTHER; note = 2'-O-methyladenosine-3'-phosphate
  modified_base 4: mod_base = OTHER; note = 2'-O-methylguanosine-3'-phosphate
  modified_base 5: mod_base = OTHER; note = 2'-O-methyluridine-3'-phosphate
  modified_base 6: mod_base = OTHER; note = 2'-O-hexadecyl-guanosine-3'-phosphate
  modified_base 7: mod_base = OTHER; note = 2'-deoxy-2'-fluorocytidine-3'-phosphate
  modified_base 8: mod_base = OTHER; note = 2'-O-methyladenosine-3'-phosphate
  modified_base 9: mod_base = OTHER; note = 2'-deoxy-2'-fluoroguanosine-3'-phosphate
  modified_base 10: mod_base = OTHER; note = 2'-deoxy-2'-fluoroguanosine-3'-phosphate
  modified_base 11: mod_base = OTHER; note = 2'-deoxy-2'-fluoroadenosine-3'-phosphate
  modified_base 12: mod_base = OTHER; note = 2'-O-methyladenosine-3'-phosphate
  modified_base 13: mod_base = OTHER; note = 2'-O-methyluridine-3'-phosphate
  modified_base 14: mod_base = OTHER; note = 2'-O-methyladenosine-3'-phosphate
  modified_base 15: mod_base = OTHER; note = 2'-O-methyluridine-3'-phosphate
  modified_base 16: mod_base = OTHER; note = 2'-O-methylguanosine-3'-phosphate
  modified_base 17: mod_base = OTHER; note = 2'-O-methyladenosine-3'-phosphate
  modified_base 18: mod_base = OTHER; note = 2'-O-methylcytidine-3'-phosphate
  modified_base 19: mod_base = OTHER; note = 2'-O-methyladenosine-3'-phosphorothioate
  modified_base 20: mod_base = OTHER; note = 2'-O-methylguanosine-3'-phosphorothioate
  modified_base 21: mod_base = OTHER; note = 2'-O-methyladenosine
ttagtgcaggaatatgacaga

SEQ ID NO: 2138 - RNA, 21 nt, synthetic construct
  source 1..21: mol_type = other RNA
  modified_base 1: mod_base = OTHER; note = 2'-O-methylguanosine-3'-phosphorothioate
  modified_base 2: mod_base = OTHER; note = 2'-O-methylcytidine-3'-phosphorothioate
  modified_base 3: mod_base = OTHER; note = 2'-O-methyladenosine-3'-phosphate
  modified_base 4: mod_base = OTHER; note = 2'-O-methylguanosine-3'-phosphate
  modified_base 5: mod_base = OTHER; note = 2'-O-methylguanosine-3'-phosphate
  modified_base 6: mod_base = OTHER; note = 2'-O-hexadecyl-adenosine-3'-phosphate
  modified_base 7: mod_base = OTHER; note = 2'-deoxy-2'-fluoroadenosine-3'-phosphate
  modified_base 8: mod_base = OTHER; note = 2'-O-methyluridine-3'-phosphate
  modified_base 9: mod_base = OTHER; note = 2'-deoxy-2'-fluoroadenosine-3'-phosphate
  modified_base 10: mod_base = OTHER; note = 2'-deoxy-2'-fluorouridine-3'-phosphate
  modified_base 11: mod_base = OTHER; note = 2'-deoxy-2'-fluoroguanosine-3'-phosphate
  modified_base 12: mod_base = OTHER; note = 2'-O-methyladenosine-3'-phosphate
  modified_base 13: mod_base = OTHER; note = 2'-O-methylcytidine-3'-phosphate
  modified_base 14: mod_base = OTHER; note = 2'-O-methyladenosine-3'-phosphate
  modified_base 15: mod_base = OTHER; note = 2'-O-methylguanosine-3'-phosphate
  modified_base 16: mod_base = OTHER; note = 2'-O-methylcytidine-3'-phosphate
  modified_base 17: mod_base = OTHER; note = 2'-O-methyladenosine-3'-phosphate
  modified_base 18: mod_base = OTHER; note = 2'-O-methylcytidine-3'-phosphate
  modified_base 19: mod_base = OTHER; note = 2'-O-methyluridine-3'-phosphorothioate
  modified_base 20: mod_base = OTHER; note = 2'-O-methyluridine-3'-phosphorothioate
  modified_base 21: mod_base = OTHER; note = 2'-O-methyladenosine
gcaggaatatgacagcactta

SEQ ID NO: 2139 - RNA, 21 nt, synthetic construct
  source 1..21: mol_type = other RNA
  modified_base 1: mod_base = OTHER; note = 2'-O-methyluridine-3'-phosphorothioate
  modified_base 2: mod_base = OTHER; note = 2'-O-methyladenosine-3'-phosphorothioate
  modified_base 3: mod_base = OTHER; note = 2'-O-methyluridine-3'-phosphate
  modified_base 4: mod_base = OTHER; note = 2'-O-methylguanosine-3'-phosphate
  modified_base 5: mod_base = OTHER; note = 2'-O-methyladenosine-3'-phosphate
  modified_base 6: mod_base = OTHER; note = 2'-O-hexadecyl-cytidine-3'-phosphate
  modified_base 7: mod_base = OTHER; note = 2'-deoxy-2'-fluoroadenosine-3'-phosphate
  modified_base 8: mod_base = OTHER; note = 2'-O-methylguanosine-3'-phosphate
  modified_base 9: mod_base = OTHER; note = 2'-deoxy-2'-fluorocytidine-3'-phosphate
  modified_base 10: mod_base = OTHER; note = 2'-deoxy-2'-fluoroadenosine-3'-phosphate
  modified_base 11: mod_base = OTHER; note = 2'-deoxy-2'-fluorocytidine-3'-phosphate
  modified_base 12: mod_base = OTHER; note = 2'-O-methyluridine-3'-phosphate
  modified_base 13: mod_base = OTHER; note = 2'-O-methyluridine-3'-phosphate
  modified_base 14: mod_base = OTHER; note = 2'-O-methylcytidine-3'-phosphate
  modified_base 15: mod_base = OTHER; note = 2'-O-methyladenosine-3'-phosphate
  modified_base 16: mod_base = OTHER; note = 2'-O-methylguanosine-3'-phosphate
  modified_base 17: mod_base = OTHER; note = 2'-O-methylcytidine-3'-phosphate
  modified_base 18: mod_base = OTHER; note = 2'-O-methylcytidine-3'-phosphate
  modified_base 19: mod_base = OTHER; note = 2'-O-methyladenosine-3'-phosphorothioate
  modified_base 20: mod_base = OTHER; note = 2'-O-methyladenosine-3'-phosphorothioate
  modified_base 21: mod_base = OTHER; note = 2'-O-methyladenosine
tatgacagcacttcagccaaa

SEQ ID NO: 2140 - RNA, 21 nt, synthetic construct
  source 1..21: mol_type = other RNA
  modified_base 1: mod_base = OTHER; note = 2'-O-methylcytidine-3'-phosphorothioate
  modified_base 2: mod_base = OTHER; note = 2'-O-methyladenosine-3'-phosphorothioate
  modified_base 3: mod_base = OTHER; note = 2'-O-methylcytidine-3'-phosphate
  modified_base 4: mod_base = OTHER; note = 2'-O-methyluridine-3'-phosphate
  modified_base 5: mod_base = OTHER; note = 2'-O-methyluridine-3'-phosphate
  modified_base 6: mod_base = OTHER; note = 2'-O-hexadecyl-cytidine-3'-phosphate
  modified_base 7: mod_base = OTHER; note = 2'-deoxy-2'-fluoroadenosine-3'-phosphate
  modified_base 8: mod_base = OTHER; note = 2'-O-methylguanosine-3'-phosphate
  modified_base 9: mod_base = OTHER; note = 2'-deoxy-2'-fluorocytidine-3'-phosphate
  modified_base 10: mod_base = OTHER; note = 2'-deoxy-2'-fluorocytidine-3'-phosphate
  modified_base 11: mod_base = OTHER; note = 2'-deoxy-2'-fluoroadenosine-3'-phosphate
  modified_base 12: mod_base = OTHER; note = 2'-O-methyladenosine-3'-phosphate
  modified_base 13: mod_base = OTHER; note = 2'-O-methylguanosine-3'-phosphate
  modified_base 14: mod_base = OTHER; note = 2'-O-methylcytidine-3'-phosphate
  modified_base 15: mod_base = OTHER; note = 2'-O-methyladenosine-3'-phosphate
  modified_base 16: mod_base = OTHER; note = 2'-O-methylguanosine-3'-phosphate
  modified_base 17: mod_base = OTHER; note = 2'-O-methyladenosine-3'-phosphate
  modified_base 18: mod_base = OTHER; note = 2'-O-methyluridine-3'-phosphate
  modified_base 19: mod_base = OTHER; note = 2'-O-methyluridine-3'-phosphorothioate
  modified_base 20: mod_base = OTHER; note = 2'-O-methylcytidine-3'-phosphorothioate
  modified_base 21: mod_base = OTHER; note = 2'-O-methyladenosine
cacttcagccaagcagattca

SEQ ID NO: 2141 - RNA, 21 nt, synthetic construct
  source 1..21: mol_type = other RNA
  modified_base 1: mod_base = OTHER; note = 2'-O-methylcytidine-3'-phosphorothioate
  modified_base 2: mod_base = OTHER; note = 2'-O-methyladenosine-3'-phosphorothioate
  modified_base 3: mod_base = OTHER; note = 2'-O-methylguanosine-3'-phosphate
  modified_base 4: mod_base = OTHER; note = 2'-O-methylcytidine-3'-phosphate
  modified_base 5: mod_base = OTHER; note = 2'-O-methylcytidine-3'-phosphate
  modified_base 6: mod_base = OTHER; note = 2'-O-hexadecyl-adenosine-3'-phosphate
  modified_base 7: mod_base = OTHER; note = 2'-deoxy-2'-fluoroadenosine-3'-phosphate
  modified_base 8: mod_base = OTHER; note = 2'-O-methylguanosine-3'-phosphate
  modified_base 9: mod_base = OTHER; note = 2'-deoxy-2'-fluorocytidine-3'-phosphate
  modified_base 10: mod_base = OTHER; note = 2'-deoxy-2'-fluoroadenosine-3'-phosphate
  modified_base 11: mod_base = OTHER; note = 2'-deoxy-2'-fluoroguanosine-3'-phosphate
  modified_base 12: mod_base = OTHER; note = 2'-O-methyladenosine-3'-phosphate
  modified_base 13: mod_base = OTHER; note = 2'-O-methyluridine-3'-phosphate
  modified_base 14: mod_base = OTHER; note = 2'-O-methyluridine-3'-phosphate
  modified_base 15: mod_base = OTHER; note = 2'-O-methylcytidine-3'-phosphate
  modified_base 16: mod_base = OTHER; note = 2'-O-methylcytidine-3'-phosphate
  modified_base 17: mod_base = OTHER; note = 2'-O-methyladenosine-3'-phosphate
  modified_base 18: mod_base = OTHER; note = 2'-O-methylguanosine-3'-phosphate
  modified_base 19: mod_base = OTHER; note = 2'-O-methyluridine-3'-phosphorothioate
  modified_base 20: mod_base = OTHER; note = 2'-O-methylcytidine-3'-phosphorothioate
  modified_base 21: mod_base = OTHER; note = 2'-O-methyladenosine
cagccaagcagattccagtca

SEQ ID NO: 2142 - RNA, 21 nt, synthetic construct
  source 1..21: mol_type = other RNA
  modified_base 1: mod_base = OTHER; note = 2'-O-methylcytidine-3'-phosphorothioate
  modified_base 2: mod_base = OTHER; note = 2'-O-methyluridine-3'-phosphorothioate
  modified_base 3: mod_base = OTHER; note = 2'-O-methylcytidine-3'-phosphate
  modified_base 4: mod_base = OTHER; note = 2'-O-methylcytidine-3'-phosphate
  modified_base 5: mod_base = OTHER; note = 2'-O-methylguanosine-3'-phosphate
  modified_base 6: mod_base = OTHER; note = 2'-O-hexadecyl-uridine-3'-phosphate
  modified_base 7: mod_base = OTHER; note = 2'-deoxy-2'-fluorouridine-3'-phosphate
  modified_base 8: mod_base = OTHER; note = 2'-O-methyluridine-3'-phosphate
  modified_base 9: mod_base = OTHER; note = 2'-deoxy-2'-fluoroadenosine-3'-phosphate
  modified_base 10: mod_base = OTHER; note = 2'-deoxy-2'-fluoroadenosine-3'-phosphate
  modified_base 11: mod_base = OTHER; note = 2'-deoxy-2'-fluoroadenosine-3'-phosphate
  modified_base 12: mod_base = OTHER; note = 2'-O-methylguanosine-3'-phosphate
  modified_base 13: mod_base = OTHER; note = 2'-O-methyluridine-3'-phosphate
  modified_base 14: mod_base = OTHER; note = 2'-O-methylcytidine-3'-phosphate
  modified_base 15: mod_base = OTHER; note = 2'-O-methyladenosine-3'-phosphate
  modified_base 16: mod_base = OTHER; note = 2'-O-methyluridine-3'-phosphate
  modified_base 17: mod_base = OTHER; note = 2'-O-methylguanosine-3'-phosphate
  modified_base 18: mod_base = OTHER; note = 2'-O-methylguanosine-3'-phosphate
  modified_base 19: mod_base = OTHER; note = 2'-O-methyladenosine-3'-phosphorothioate
  modified_base 20: mod_base = OTHER; note = 2'-O-methylguanosine-3'-phosphorothioate
  modified_base 21: mod_base = OTHER; note = 2'-O-methyladenosine
ctccgtttaaagtcatggaga

SEQ ID NO: 2143 - RNA, 21 nt, synthetic construct
  source 1..21: mol_type = other RNA
  modified_base 1: mod_base = OTHER; note = 2'-O-methyladenosine-3'-phosphorothioate
  modified_base 2: mod_base = OTHER; note = 2'-O-methyladenosine-3'-phosphorothioate
  modified_base 3: mod_base = OTHER; note = 2'-O-methyladenosine-3'-phosphate
  modified_base 4: mod_base = OTHER; note = 2'-O-methylguanosine-3'-phosphate
  modified_base 5: mod_base = OTHER; note = 2'-O-methyluridine-3'-phosphate
  modified_base 6: mod_base = OTHER; note = 2'-O-hexadecyl-cytidine-3'-phosphate
  modified_base 7: mod_base = OTHER; note = 2'-deoxy-2'-fluoroadenosine-3'-phosphate
  modified_base 8: mod_base = OTHER; note = 2'-O-methyluridine-3'-phosphate
  modified_base 9: mod_base = OTHER; note = 2'-deoxy-2'-fluoroguanosine-3'-phosphate
  modified_base 10: mod_base = OTHER; note = 2'-deoxy-2'-fluoroguanosine-3'-phosphate
  modified_base 11: mod_base = OTHER; note = 2'-deoxy-2'-fluoroadenosine-3'-phosphate
  modified_base 12: mod_base = OTHER; note = 2'-O-methylguanosine-3'-phosphate
  modified_base 13: mod_base = OTHER; note = 2'-O-methylguanosine-3'-phosphate
  modified_base 14: mod_base = OTHER; note = 2'-O-methylcytidine-3'-phosphate
  modified_base 15: mod_base = OTHER; note = 2'-O-methyluridine-3'-phosphate
  modified_base 16: mod_base = OTHER; note = 2'-O-methyladenosine-3'-phosphate
  modified_base 17: mod_base = OTHER; note = 2'-O-methyluridine-3'-phosphate
  modified_base 18: mod_base = OTHER; note = 2'-O-methyladenosine-3'-phosphate
  modified_base 19: mod_base = OTHER; note = 2'-O-methylguanosine-3'-phosphorothioate
  modified_base 20: mod_base = OTHER; note = 2'-O-methylguanosine-3'-phosphorothioate
  modified_base 21: mod_base = OTHER; note = 2'-O-methyladenosine
aaagtcatggaggctatagga

SEQ ID NO: 2144 - RNA, 21 nt, synthetic construct
  source 1..21: mol_type = other RNA
  modified_base 1: mod_base = OTHER; note = 2'-O-methylguanosine-3'-phosphorothioate
  modified_base 2: mod_base = OTHER; note = 2'-O-methylguanosine-3'-phosphorothioate
  modified_base 3: mod_base = OTHER; note = 2'-O-methyladenosine-3'-phosphate
  modified_base 4: mod_base = OTHER; note = 2'-O-methylguanosine-3'-phosphate
  modified_base 5: mod_base = OTHER; note = 2'-O-methylguanosine-3'-phosphate
  modified_base 6: mod_base = OTHER; note = 2'-O-hexadecyl-cytidine-3'-phosphate
  modified_base 7: mod_base = OTHER; note = 2'-deoxy-2'-fluorouridine-3'-phosphate
  modified_base 8: mod_base = OTHER; note = 2'-O-methyladenosine-3'-phosphate
  modified_base 9: mod_base = OTHER; note = 2'-deoxy-2'-fluorouridine-3'-phosphate
  modified_base 10: mod_base = OTHER; note = 2'-deoxy-2'-fluoroadenosine-3'-phosphate
  modified_base 11: mod_base = OTHER; note = 2'-deoxy-2'-fluoroguanosine-3'-phosphate
  modified_base 12: mod_base = OTHER; note = 2'-O-methylguanosine-3'-phosphate
  modified_base 13: mod_base = OTHER; note = 2'-O-methyladenosine-3'-phosphate
  modified_base 14: mod_base = OTHER; note = 2'-O-methyluridine-3'-phosphate
  modified_base 15: mod_base = OTHER; note = 2'-O-methylcytidine-3'-phosphate
  modified_base 16: mod_base = OTHER; note = 2'-O-methyluridine-3'-phosphate
  modified_base 17: mod_base = OTHER; note = 2'-O-methyluridine-3'-phosphate
  modified_base 18: mod_base = OTHER; note = 2'-O-methyladenosine-3'-phosphate
  modified_base 19: mod_base = OTHER; note = 2'-O-methyluridine-3'-phosphorothioate
  modified_base 20: mod_base = OTHER; note = 2'-O-methylguanosine-3'-phosphorothioate
  modified_base 21: mod_base = OTHER; note = 2'-O-methyladenosine
ggaggctataggatcttatga

SEQ ID NO: 2145 - RNA, 21 nt, synthetic construct
  source 1..21: mol_type = other RNA
  modified_base 1: mod_base = OTHER; note = 2'-O-methylcytidine-3'-phosphorothioate
  modified_base 2: mod_base = OTHER; note = 2'-O-methyluridine-3'-phosphorothioate
  modified_base 3: mod_base = OTHER; note = 2'-O-methyladenosine-3'-phosphate
  modified_base 4: mod_base = OTHER; note = 2'-O-methyluridine-3'-phosphate
  modified_base 5: mod_base = OTHER; note = 2'-O-methyladenosine-3'-phosphate
  modified_base 6: mod_base = OTHER; note = 2'-O-hexadecyl-guanosine-3'-phosphate
  modified_base 7: mod_base = OTHER; note = 2'-deoxy-2'-fluoroguanosine-3'-phosphate
  modified_base 8: mod_base = OTHER; note = 2'-O-methyladenosine-3'-phosphate
  modified_base 9: mod_base = OTHER; note = 2'-deoxy-2'-fluorouridine-3'-phosphate
  modified_base 10: mod_base = OTHER; note = 2'-deoxy-2'-fluorocytidine-3'-phosphate
  modified_base 11: mod_base = OTHER; note = 2'-deoxy-2'-fluorouridine-3'-phosphate
  modified_base 12: mod_base = OTHER; note = 2'-O-methyluridine-3'-phosphate
  modified_base 13: mod_base = OTHER; note = 2'-O-methyladenosine-3'-phosphate
  modified_base 14: mod_base = OTHER; note = 2'-O-methyluridine-3'-phosphate
  modified_base 15: mod_base = OTHER; note = 2'-O-methylguanosine-3'-phosphate
  modified_base 16: mod_base = OTHER; note = 2'-O-methyluridine-3'-phosphate
  modified_base 17: mod_base = OTHER; note = 2'-O-methyladenosine-3'-phosphate
  modified_base 18: mod_base = OTHER; note = 2'-O-methyladenosine-3'-phosphate
  modified_base 19: mod_base = OTHER; note = 2'-O-methyladenosine-3'-phosphorothioate
  modified_base 20: mod_base = OTHER; note = 2'-O-methylcytidine-3'-phosphorothioate
  modified_base 21: mod_base = OTHER; note = 2'-O-methyladenosine
ctataggatcttatgtaaaca

SEQ ID NO: 2146 - RNA, 21 nt, synthetic construct
  source 1..21: mol_type = other RNA
  modified_base 1: mod_base = OTHER; note = 2'-O-methylguanosine-3'-phosphorothioate
  modified_base 2: mod_base = OTHER; note = 2'-O-methylguanosine-3'-phosphorothioate
  modified_base 3: mod_base = OTHER; note = 2'-O-methyladenosine-3'-phosphate
  modified_base 4: mod_base = OTHER; note = 2'-O-methyluridine-3'-phosphate
  modified_base 5: mod_base = OTHER; note = 2'-O-methylcytidine-3'-phosphate
  modified_base 6: mod_base = OTHER; note = 2'-O-hexadecyl-uridine-3'-phosphate
  modified_base 7: mod_base = OTHER; note = 2'-deoxy-2'-fluorouridine-3'-phosphate
  modified_base 8: mod_base = OTHER; note = 2'-O-methyladenosine-3'-phosphate
  modified_base 9: mod_base = OTHER; note = 2'-deoxy-2'-fluorouridine-3'-phosphate
  modified_base 10: mod_base = OTHER; note = 2'-deoxy-2'-fluoroguanosine-3'-phosphate
  modified_base 11: mod_base = OTHER; note = 2'-deoxy-2'-fluorouridine-3'-phosphate
  modified_base 12: mod_base = OTHER; note = 2'-O-methyladenosine-3'-phosphate
  modified_base 13: mod_base = OTHER; note = 2'-O-methyladenosine-3'-phosphate
  modified_base 14: mod_base = OTHER; note = 2'-O-methyladenosine-3'-phosphate
  modified_base 15: mod_base = OTHER; note = 2'-O-methylcytidine-3'-phosphate
  modified_base 16: mod_base = OTHER; note = 2'-O-methyladenosine-3'-phosphate
  modified_base 17: mod_base = OTHER; note = 2'-O-methylguanosine-3'-phosphate
  modified_base 18: mod_base = OTHER; note = 2'-O-methyluridine-3'-phosphate
  modified_base 19: mod_base = OTHER; note = 2'-O-methyluridine-3'-phosphorothioate
  modified_base 20: mod_base = OTHER; note = 2'-O-methyluridine-3'-phosphorothioate
  modified_base 21: mod_base = OTHER; note = 2'-O-methyladenosine
ggatcttatgtaaacagttta

SEQ ID NO: 2147 - RNA, 21 nt, synthetic construct
  source 1..21: mol_type = other RNA
  modified_base 1: mod_base = OTHER; note = 2'-O-methyladenosine-3'-phosphorothioate
  modified_base 2: mod_base = OTHER; note = 2'-O-methyladenosine-3'-phosphorothioate
  modified_base 3: mod_base = OTHER; note = 2'-O-methyladenosine-3'-phosphate
  modified_base 4: mod_base = OTHER; note = 2'-O-methylcytidine-3'-phosphate
  modified_base 5: mod_base = OTHER; note = 2'-O-methyladenosine-3'-phosphate
  modified_base 6: mod_base = OTHER; note = 2'-O-hexadecyl-guanosine-3'-phosphate
  modified_base 7: mod_base = OTHER; note = 2'-deoxy-2'-fluorouridine-3'-phosphate
  modified_base 8: mod_base = OTHER; note = 2'-O-methyluridine-3'-phosphate
  modified_base 9: mod_base = OTHER; note = 2'-deoxy-2'-fluorouridine-3'-phosphate
  modified_base 10: mod_base = OTHER; note = 2'-deoxy-2'-fluorouridine-3'-phosphate
  modified_base 11: mod_base = OTHER; note = 2'-deoxy-2'-fluorouridine-3'-phosphate
  modified_base 12: mod_base = OTHER; note = 2'-O-methylguanosine-3'-phosphate
  modified_base 13: mod_base = OTHER; note = 2'-O-methyluridine-3'-phosphate
  modified_base 14: mod_base = OTHER; note = 2'-O-methyluridine-3'-phosphate
  modified_base 15: mod_base = OTHER; note = 2'-O-methyluridine-3'-phosphate
  modified_base 16: mod_base = OTHER; note = 2'-O-methylcytidine-3'-phosphate
  modified_base 17: mod_base = OTHER; note = 2'-O-methyluridine-3'-phosphate
  modified_base 18: mod_base = OTHER; note = 2'-O-methylguanosine-3'-phosphate
  modified_base 19: mod_base = OTHER; note = 2'-O-methyladenosine-3'-phosphorothioate
  modified_base 20: mod_base = OTHER; note = 2'-O-methyluridine-3'-phosphorothioate
  modified_base 21: mod_base = OTHER; note = 2'-O-methyladenosine
aaacagtttttgtttctgata

SEQ ID NO: 2148 - RNA, 21 nt, synthetic construct
  source 1..21: mol_type = other RNA
  modified_base 1: mod_base = OTHER; note = 2'-O-methylguanosine-3'-phosphorothioate
  modified_base 2: mod_base = OTHER; note = 2'-O-methyluridine-3'-phosphorothioate
  modified_base 3: mod_base = OTHER; note = 2'-O-methyluridine-3'-phosphate
  modified_base 4: mod_base = OTHER; note = 2'-O-methyluridine-3'-phosphate
  modified_base 5: mod_base = OTHER; note = 2'-O-methyluridine-3'-phosphate
  modified_base 6: mod_base = OTHER; note = 2'-O-hexadecyl-uridine-3'-phosphate
  modified_base 7: mod_base = OTHER; note = 2'-deoxy-2'-fluoroguanosine-3'-phosphate
  modified_base 8: mod_base = OTHER; note = 2'-O-methyluridine-3'-phosphate
  modified_base 9: mod_base = OTHER; note = 2'-deoxy-2'-fluorouridine-3'-phosphate
  modified_base 10: mod_base = OTHER; note = 2'-deoxy-2'-fluorouridine-3'-phosphate
  modified_base 11: mod_base = OTHER; note = 2'-deoxy-2'-fluorocytidine-3'-phosphate
  modified_base 12: mod_base = OTHER; note = 2'-O-methyluridine-3'-phosphate
  modified_base 13: mod_base = OTHER; note = 2'-O-methylguanosine-3'-phosphate
  modified_base 14: mod_base = OTHER; note = 2'-O-methyladenosine-3'-phosphate
  modified_base 15: mod_base = OTHER; note = 2'-O-methyluridine-3'-phosphate
  modified_base 16: mod_base = OTHER; note = 2'-O-methyladenosine-3'-phosphate
  modified_base 17: mod_base = OTHER; note = 2'-O-methylguanosine-3'-phosphate
  modified_base 18: mod_base = OTHER; note = 2'-O-methyluridine-3'-phosphate
  modified_base 19: mod_base = OTHER; note = 2'-O-methyladenosine-3'-phosphorothioate
  modified_base 20: mod_base = OTHER; note = 2'-O-methyladenosine-3'-phosphorothioate
  modified_base 21: mod_base = OTHER; note = 2'-O-methyladenosine
gtttttgtttctgatagtaaa

SEQ ID NO: 2149 - RNA, 21 nt, synthetic construct
  source 1..21: mol_type = other RNA
  modified_base 1: mod_base = OTHER; note = 2'-O-methyluridine-3'-phosphorothioate
  modified_base 2: mod_base = OTHER; note = 2'-O-methylguanosine-3'-phosphorothioate
  modified_base 3: mod_base = OTHER; note = 2'-O-methyluridine-3'-phosphate
  modified_base 4: mod_base = OTHER; note = 2'-O-methyluridine-3'-phosphate
  modified_base 5: mod_base = OTHER; note = 2'-O-methyluridine-3'-phosphate
  modified_base 6: mod_base = OTHER; note = 2'-O-hexadecyl-cytidine-3'-phosphate
  modified_base 7: mod_base = OTHER; note = 2'-deoxy-2'-fluorouridine-3'-phosphate
  modified_base 8: mod_base = OTHER; note = 2'-O-methylguanosine-3'-phosphate
  modified_base 9: mod_base = OTHER; note = 2'-deoxy-2'-fluoroadenosine-3'-phosphate
  modified_base 10: mod_base = OTHER; note = 2'-deoxy-2'-fluorouridine-3'-phosphate
  modified_base 11: mod_base = OTHER; note = 2'-deoxy-2'-fluoroadenosine-3'-phosphate
  modified_base 12: mod_base = OTHER; note = 2'-O-methylguanosine-3'-phosphate
  modified_base 13: mod_base = OTHER; note = 2'-O-methyluridine-3'-phosphate
  modified_base 14: mod_base = OTHER; note = 2'-O-methyladenosine-3'-phosphate
  modified_base 15: mod_base = OTHER; note = 2'-O-methyladenosine-3'-phosphate
  modified_base 16: mod_base = OTHER; note = 2'-O-methyluridine-3'-phosphate
  modified_base 17: mod_base = OTHER; note = 2'-O-methylguanosine-3'-phosphate
  modified_base 18: mod_base = OTHER; note = 2'-O-methylguanosine-3'-phosphate
  modified_base 19: mod_base = OTHER; note = 2'-O-methyladenosine-3'-phosphorothioate
  modified_base 20: mod_base = OTHER; note = 2'-O-methylcytidine-3'-phosphorothioate
  modified_base 21: mod_base = OTHER; note = 2'-O-methyladenosine
tgtttctgatagtaatggaca

SEQ ID NO: 2150 - RNA, 21 nt, synthetic construct
  source 1..21: mol_type = other RNA
  modified_base 1: mod_base = OTHER; note = 2'-O-methylcytidine-3'-phosphorothioate
  modified_base 2: mod_base = OTHER; note = 2'-O-methyluridine-3'-phosphorothioate
  modified_base 3: mod_base = OTHER; note = 2'-O-methylguanosine-3'-phosphate
  modified_base 4: mod_base = OTHER; note = 2'-O-methyladenosine-3'-phosphate
  modified_base 5: mod_base = OTHER; note = 2'-O-methyluridine-3'-phosphate
  modified_base 6: mod_base = OTHER; note = 2'-O-hexadecyl-adenosine-3'-phosphate
  modified_base 7: mod_base = OTHER; note = 2'-deoxy-2'-fluoroguanosine-3'-phosphate
  modified_base 8: mod_base = OTHER; note = 2'-O-methyluridine-3'-phosphate
  modified_base 9: mod_base = OTHER; note = 2'-deoxy-2'-fluoroadenosine-3'-phosphate
  modified_base 10: mod_base = OTHER; note = 2'-deoxy-2'-fluoroadenosine-3'-phosphate
  modified_base 11: mod_base = OTHER; note = 2'-deoxy-2'-fluorouridine-3'-phosphate
  modified_base 12: mod_base = OTHER; note = 2'-O-methylguanosine-3'-phosphate
  modified_base 13: mod_base = OTHER; note = 2'-O-methylguanosine-3'-phosphate
  modified_base 14: mod_base = OTHER; note = 2'-O-methyladenosine-3'-phosphate
  modified_base 15: mod_base = OTHER; note = 2'-O-methylcytidine-3'-phosphate
  modified_base 16: mod_base = OTHER; note = 2'-O-methyluridine-3'-phosphate
  modified_base 17: mod_base = OTHER; note = 2'-O-methyluridine-3'-phosphate
  modified_base 18: mod_base = OTHER; note = 2'-O-methyluridine-3'-phosphate
  modified_base 19: mod_base = OTHER; note = 2'-O-methyladenosine-3'-phosphorothioate
  modified_base 20: mod_base = OTHER; note = 2'-O-methyluridine-3'-phosphorothioate
  modified_base 21: mod_base = OTHER; note = 2'-O-methyladenosine
ctgatagtaatggactttata

SEQ ID NO: 2151 - RNA, 21 nt, synthetic construct
  source 1..21: mol_type = other RNA
  modified_base 1: mod_base = OTHER; note = 2'-O-methyladenosine-3'-phosphorothioate
  modified_base 2: mod_base = OTHER; note = 2'-O-methyladenosine-3'-phosphorothioate
  modified_base 3: mod_base = OTHER; note = 2'-O-methyluridine-3'-phosphate
  modified_base 4: mod_base = OTHER; note = 2'-O-methylguanosine-3'-phosphate
  modified_base 5: mod_base = OTHER; note = 2'-O-methylguanosine-3'-phosphate
  modified_base 6: mod_base = OTHER; note = 2'-O-hexadecyl-adenosine-3'-phosphate
  modified_base 7: mod_base = OTHER; note = 2'-deoxy-2'-fluorocytidine-3'-phosphate
  modified_base 8: mod_base = OTHER; note = 2'-O-methyluridine-3'-phosphate
  modified_base 9: mod_base = OTHER; note = 2'-deoxy-2'-fluorouridine-3'-phosphate
  modified_base 10: mod_base = OTHER; note = 2'-deoxy-2'-fluorouridine-3'-phosphate
  modified_base 11: mod_base = OTHER; note = 2'-deoxy-2'-fluoroadenosine-3'-phosphate
  modified_base 12: mod_base = OTHER; note = 2'-O-methyluridine-3'-phosphate
  modified_base 13: mod_base = OTHER; note = 2'-O-methyluridine-3'-phosphate
  modified_base 14: mod_base = OTHER; note = 2'-O-methylcytidine-3'-phosphate
  modified_base 15: mod_base = OTHER; note = 2'-O-methyluridine-3'-phosphate
  modified_base 16: mod_base = OTHER; note = 2'-O-methyladenosine-3'-phosphate
  modified_base 17: mod_base = OTHER; note = 2'-O-methyladenosine-3'-phosphate
  modified_base 18: mod_base = OTHER; note = 2'-O-methylcytidine-3'-phosphate
  modified_base 19: mod_base = OTHER; note = 2'-O-methyluridine-3'-phosphorothioate
  modified_base 20: mod_base = OTHER; note = 2'-O-methyluridine-3'-phosphorothioate
  modified_base 21: mod_base = OTHER; note = 2'-O-methyladenosine
aatggactttattctaactta

SEQ ID NO: 2152 - RNA, 21 nt, synthetic construct
  source 1..21: mol_type = other RNA
  modified_base 1: mod_base = OTHER; note = 2'-O-methyluridine-3'-phosphorothioate
  modified_base 2: mod_base = OTHER; note = 2'-O-methyluridine-3'-phosphorothioate
  modified_base 3: mod_base = OTHER; note = 2'-O-methyluridine-3'-phosphate
  modified_base 4: mod_base = OTHER; note = 2'-O-methyladenosine-3'-phosphate
  modified_base 5: mod_base = OTHER; note = 2'-O-methyluridine-3'-phosphate
  modified_base 6: mod_base = OTHER; note = 2'-O-hexadecyl-uridine-3'-phosphate
  modified_base 7: mod_base = OTHER; note = 2'-deoxy-2'-fluorocytidine-3'-phosphate
  modified_base 8: mod_base = OTHER; note = 2'-O-methyluridine-3'-phosphate
  modified_base 9: mod_base = OTHER; note = 2'-deoxy-2'-fluoroadenosine-3'-phosphate
  modified_base 10: mod_base = OTHER; note = 2'-deoxy-2'-fluoroadenosine-3'-phosphate
  modified_base 11: mod_base = OTHER; note = 2'-deoxy-2'-fluorocytidine-3'-phosphate
  modified_base 12: mod_base = OTHER; note = 2'-O-methyluridine-3'-phosphate
  modified_base 13: mod_base = OTHER; note = 2'-O-methyluridine-3'-phosphate
  modified_base 14: mod_base = OTHER; note = 2'-O-methylguanosine-3'-phosphate
  modified_base 15: mod_base = OTHER; note = 2'-O-methyladenosine-3'-phosphate
  modified_base 16: mod_base = OTHER; note = 2'-O-methylguanosine-3'-phosphate
  modified_base 17: mod_base = OTHER; note = 2'-O-methyladenosine-3'-phosphate
  modified_base 18: mod_base = OTHER; note = 2'-O-methyluridine-3'-phosphate
  modified_base 19: mod_base = OTHER; note = 2'-O-methylcytidine-3'-phosphorothioate
  modified_base 20: mod_base = OTHER; note = 2'-O-methyladenosine-3'-phosphorothioate
  modified_base 21: mod_base = OTHER; note = 2'-O-methyladenosine
tttattctaacttgagatcaa

SEQ ID NO: 2153 - RNA, 21 nt, synthetic construct
  source 1..21: mol_type = other RNA
  modified_base 1: mod_base = OTHER; note = 2'-O-methyluridine-3'-phosphorothioate
  modified_base 2: mod_base = OTHER; note = 2'-O-methylcytidine-3'-phosphorothioate
  modified_base 3: mod_base = OTHER; note = 2'-O-methyluridine-3'-phosphate
  modified_base 4: mod_base = OTHER; note = 2'-O-methyladenosine-3'-phosphate
  modified_base 5: mod_base = OTHER; note = 2'-O-methyladenosine-3'-phosphate
  modified_base 6: mod_base = OTHER; note = 2'-O-hexadecyl-cytidine-3'-phosphate
  modified_base 7: mod_base = OTHER; note = 2'-deoxy-2'-fluorouridine-3'-phosphate
  modified_base 8: mod_base = OTHER; note = 2'-O-methyluridine-3'-phosphate
  modified_base 9: mod_base = OTHER; note = 2'-deoxy-2'-fluoroguanosine-3'-phosphate
  modified_base 10: mod_base = OTHER; note = 2'-deoxy-2'-fluoroadenosine-3'-phosphate
  modified_base 11: mod_base = OTHER; note = 2'-deoxy-2'-fluoroguanosine-3'-phosphate
  modified_base 12: mod_base = OTHER; note = 2'-O-methyladenosine-3'-phosphate
  modified_base 13: mod_base = OTHER; note = 2'-O-methyluridine-3'-phosphate
  modified_base 14: mod_base = OTHER; note = 2'-O-methylcytidine-3'-phosphate
  modified_base 15: mod_base = OTHER; note = 2'-O-methyladenosine-3'-phosphate
  modified_base 16: mod_base = OTHER; note = 2'-O-methylguanosine-3'-phosphate
  modified_base 17: mod_base = OTHER; note = 2'-O-methyluridine-3'-phosphate
  modified_base 18: mod_base = OTHER; note = 2'-O-methylguanosine-3'-phosphate
  modified_base 19: mod_base = OTHER; note = 2'-O-methylguanosine-3'-phosphorothioate
  modified_base 20: mod_base = OTHER; note = 2'-O-methylcytidine-3'-phosphorothioate
  modified_base 21: mod_base = OTHER; note = 2'-O-methyladenosine
tctaacttgagatcagtggca

SEQ ID NO: 2154 - RNA, 21 nt, synthetic construct
  source 1..21: mol_type = other RNA
  modified_base 1: mod_base = OTHER; note = 2'-O-methylguanosine-3'-phosphorothioate
  modified_base 2: mod_base = OTHER; note = 2'-O-methyladenosine-3'-phosphorothioate
  modified_base 3: mod_base = OTHER; note = 2'-O-methylguanosine-3'-phosphate
  modified_base 4: mod_base = OTHER; note = 2'-O-methyladenosine-3'-phosphate
  modified_base 5: mod_base = OTHER; note = 2'-O-methyluridine-3'-phosphate
  modified_base 6: mod_base = OTHER; note = 2'-O-hexadecyl-cytidine-3'-phosphate
  modified_base 7: mod_base = OTHER; note = 2'-deoxy-2'-fluoroadenosine-3'-phosphate
  modified_base 8: mod_base = OTHER; note = 2'-O-methylguanosine-3'-phosphate
  modified_base 9: mod_base = OTHER; note = 2'-deoxy-2'-fluorouridine-3'-phosphate
  modified_base 10: mod_base = OTHER; note = 2'-deoxy-2'-fluoroguanosine-3'-phosphate
  modified_base 11: mod_base = OTHER; note = 2'-deoxy-2'-fluoroguanosine-3'-phosphate
  modified_base 12: mod_base = OTHER; note = 2'-O-methylcytidine-3'-phosphate
  modified_base 13: mod_base = OTHER; note = 2'-O-methylguanosine-3'-phosphate
  modified_base 14: mod_base = OTHER; note = 2'-O-methylguanosine-3'-phosphate
  modified_base 15: mod_base = OTHER; note = 2'-O-methyladenosine-3'-phosphate
  modified_base 16: mod_base = OTHER; note = 2'-O-methyluridine-3'-phosphate
  modified_base 17: mod_base = OTHER; note = 2'-O-methylcytidine-3'-phosphate
  modified_base 18: mod_base = OTHER; note = 2'-O-methyladenosine-3'-phosphate
  modified_base 19: mod_base = OTHER; note = 2'-O-methyladenosine-3'-phosphorothioate
  modified_base 20: mod_base = OTHER; note = 2'-O-methyladenosine-3'-phosphorothioate
  modified_base 21: mod_base = OTHER; note = 2'-O-methyladenosine
gagatcagtggcggatcaaaa

SEQ ID NO: 2155 - RNA, 21 nt, synthetic construct
  source 1..21: mol_type = other RNA
  modified_base 1: mod_base = OTHER; note = 2'-O-methylcytidine-3'-phosphorothioate
  modified_base 2: mod_base = OTHER; note = 2'-O-methyladenosine-3'-phosphorothioate
  modified_base 3: mod_base = OTHER; note = 2'-O-methylguanosine-3'-phosphate
  modified_base 4: mod_base = OTHER; note = 2'-O-methyluridine-3'-phosphate
  modified_base 5: mod_base = OTHER; note = 2'-O-methylguanosine-3'-phosphate
  modified_base 6: mod_base = OTHER; note = 2'-O-hexadecyl-guanosine-3'-phosphate
  modified_base 7: mod_base = OTHER; note = 2'-deoxy-2'-fluorocytidine-3'-phosphate
  modified_base 8: mod_base = OTHER; note = 2'-O-methylguanosine-3'-phosphate
  modified_base 9: mod_base = OTHER; note = 2'-deoxy-2'-fluoroguanosine-3'-phosphate
  modified_base 10: mod_base = OTHER; note = 2'-deoxy-2'-fluoroadenosine-3'-phosphate
  modified_base 11: mod_base = OTHER; note = 2'-deoxy-2'-fluorouridine-3'-phosphate
  modified_base 12: mod_base = OTHER; note = 2'-O-methylcytidine-3'-phosphate
  modified_base 13: mod_base = OTHER; note = 2'-O-methyladenosine-3'-phosphate
  modified_base 14: mod_base = OTHER; note = 2'-O-methyladenosine-3'-phosphate
  modified_base 15: mod_base = OTHER; note = 2'-O-methyladenosine-3'-phosphate
  modified_base 16: mod_base = OTHER; note = 2'-O-methyladenosine-3'-phosphate
  modified_base 17: mod_base = OTHER; note = 2'-O-methylcytidine-3'-phosphate
  modified_base 18: mod_base = OTHER; note = 2'-O-methylcytidine-3'-phosphate
  modified_base 19: mod_base = OTHER; note = 2'-O-methyluridine-3'-phosphorothioate
  modified_base 20: mod_base = OTHER; note = 2'-O-methyladenosine-3'-phosphorothioate
  modified_base 21: mod_base = OTHER; note = 2'-O-methyladenosine
cagtggcggatcaaaacctaa

SEQ ID NO: 2156 - RNA, 21 nt, synthetic construct
  source 1..21: mol_type = other RNA
  modified_base 1: mod_base = OTHER; note = 2'-O-methylguanosine-3'-phosphorothioate
  modified_base 2: mod_base = OTHER; note = 2'-O-methylguanosine-3'-phosphorothioate
  modified_base 3: mod_base = OTHER; note = 2'-O-methyladenosine-3'-phosphate
  modified_base 4: mod_base = OTHER; note = 2'-O-methyluridine-3'-phosphate
  modified_base 5: mod_base = OTHER; note = 2'-O-methylcytidine-3'-phosphate
  modified_base 6: mod_base = OTHER; note = 2'-O-hexadecyl-adenosine-3'-phosphate
  modified_base 7: mod_base = OTHER; note = 2'-deoxy-2'-fluoroadenosine-3'-phosphate
  modified_base 8: mod_base = OTHER; note = 2'-O-methyladenosine-3'-phosphate
  modified_base 9: mod_base = OTHER; note = 2'-deoxy-2'-fluoroadenosine-3'-phosphate
  modified_base 10: mod_base = OTHER; note = 2'-deoxy-2'-fluorocytidine-3'-phosphate
  modified_base 11: mod_base = OTHER; note = 2'-deoxy-2'-fluorocytidine-3'-phosphate
  modified_base 12: mod_base = OTHER; note = 2'-O-methyluridine-3'-phosphate
  modified_base 13: mod_base = OTHER; note = 2'-O-methyladenosine-3'-phosphate
  modified_base 14: mod_base = OTHER; note = 2'-O-methylcytidine-3'-phosphate
  modified_base 15: mod_base = OTHER; note = 2'-O-methyladenosine-3'-phosphate
  modified_base 16: mod_base = OTHER; note = 2'-O-methyladenosine-3'-phosphate
  modified_base 17: mod_base = OTHER; note = 2'-O-methylguanosine-3'-phosphate
  modified_base 18: mod_base = OTHER; note = 2'-O-methyladenosine-3'-phosphate
  modified_base 19: mod_base = OTHER; note = 2'-O-methyluridine-3'-phosphorothioate
  modified_base 20: mod_base = OTHER; note = 2'-O-methyluridine-3'-phosphorothioate
  modified_base 21: mod_base = OTHER; note = 2'-O-methyladenosine
ggatcaaaacctacaagatta

SEQ ID NO: 2157 - RNA, 21 nt, synthetic construct
  source 1..21: mol_type = other RNA
  modified_base 1: mod_base = OTHER; note = 2'-O-methyladenosine-3'-phosphorothioate
  modified_base 2: mod_base = OTHER; note = 2'-O-methyladenosine-3'-phosphorothioate
  modified_base 3: mod_base = OTHER; note = 2'-O-methyladenosine-3'-phosphate
  modified_base 4: mod_base = OTHER; note = 2'-O-methyladenosine-3'-phosphate
  modified_base 5: mod_base = OTHER; note = 2'-O-methylcytidine-3'-phosphate
  modified_base 6: mod_base = OTHER; note = 2'-O-hexadecyl-cytidine-3'-phosphate
  modified_base 7: mod_base = OTHER; note = 2'-deoxy-2'-fluorouridine-3'-phosphate
  modified_base 8: mod_base = OTHER; note = 2'-O-methyladenosine-3'-phosphate
  modified_base 9: mod_base = OTHER; note = 2'-deoxy-2'-fluorocytidine-3'-phosphate
  modified_base 10: mod_base = OTHER; note = 2'-deoxy-2'-fluoroadenosine-3'-phosphate
  modified_base 11: mod_base = OTHER; note = 2'-deoxy-2'-fluoroadenosine-3'-phosphate
  modified_base 12: mod_base = OTHER; note = 2'-O-methylguanosine-3'-phosphate
  modified_base 13: mod_base = OTHER; note = 2'-O-methyladenosine-3'-phosphate
  modified_base 14: mod_base = OTHER; note = 2'-O-methyluridine-3'-phosphate
  modified_base 15: mod_base = OTHER; note = 2'-O-methyluridine-3'-phosphate
  modified_base 16: mod_base = OTHER; note = 2'-O-methylcytidine-3'-phosphate
  modified_base 17: mod_base = OTHER; note = 2'-O-methyladenosine-3'-phosphate
  modified_base 18: mod_base = OTHER; note = 2'-O-methyladenosine-3'-phosphate
  modified_base 19: mod_base = OTHER; note = 2'-O-methylcytidine-3'-phosphorothioate
  modified_base 20: mod_base = OTHER; note = 2'-O-methyluridine-3'-phosphorothioate
  modified_base 21: mod_base = OTHER; note = 2'-O-methyladenosine
aaaacctacaagattcaacta

SEQ ID NO: 2158 - RNA, 21 nt, synthetic construct
  source 1..21: mol_type = other RNA
  modified_base 1: mod_base = OTHER; note = 2'-O-methylcytidine-3'-phosphorothioate
  modified_base 2: mod_base = OTHER; note = 2'-O-methyluridine-3'-phosphorothioate
  modified_base 3: mod_base = OTHER; note = 2'-O-methyladenosine-3'-phosphate
  modified_base 4: mod_base = OTHER; note = 2'-O-methylcytidine-3'-phosphate
  modified_base 5: mod_base = OTHER; note = 2'-O-methyladenosine-3'-phosphate
  modified_base 6: mod_base = OTHER; note = 2'-O-hexadecyl-adenosine-3'-phosphate
  modified_base 7: mod_base = OTHER; note = 2'-deoxy-2'-fluoroguanosine-3'-phosphate
  modified_base 8: mod_base = OTHER; note = 2'-O-methyladenosine-3'-phosphate
  modified_base 9: mod_base = OTHER; note = 2'-deoxy-2'-fluorouridine-3'-phosphate
  modified_base 10: mod_base = OTHER; note = 2'-deoxy-2'-fluorouridine-3'-phosphate
  modified_base 11: mod_base = OTHER; note = 2'-deoxy-2'-fluorocytidine-3'-phosphate
  modified_base 12: mod_base = OTHER; note = 2'-O-methyladenosine-3'-phosphate
  modified_base 13: mod_base = OTHER; note = 2'-O-methyladenosine-3'-phosphate
  modified_base 14: mod_base = OTHER; note = 2'-O-methylcytidine-3'-phosphate
  modified_base 15: mod_base = OTHER; note = 2'-O-methyluridine-3'-phosphate
  modified_base 16: mod_base = OTHER; note = 2'-O-methylguanosine-3'-phosphate
  modified_base 17: mod_base = OTHER; note = 2'-O-methyladenosine-3'-phosphate
  modified_base 18: mod_base = OTHER; note = 2'-O-methyladenosine-3'-phosphate
  modified_base 19: mod_base = OTHER; note = 2'-O-methyladenosine-3'-phosphorothioate
  modified_base 20: mod_base = OTHER; note = 2'-O-methyladenosine-3'-phosphorothioate
  modified_base 21: mod_base = OTHER; note = 2'-O-methyladenosine
ctacaagattcaactgaaaaa

SEQ ID NO: 2159 - RNA, 21 nt, synthetic construct
  source 1..21: mol_type = other RNA
  modified_base 1: mod_base = OTHER; note = 2'-O-methyladenosine-3'-phosphorothioate
  modified_base 2: mod_base = OTHER; note = 2'-O-methylguanosine-3'-phosphorothioate
  modified_base 3: mod_base = OTHER; note = 2'-O-methyladenosine-3'-phosphate
  modified_base 4: mod_base = OTHER; note = 2'-O-methyluridine-3'-phosphate
  modified_base 5: mod_base = OTHER; note = 2'-O-methyluridine-3'-phosphate
  modified_base 6: mod_base = OTHER; note = 2'-O-hexadecyl-cytidine-3'-phosphate
  modified_base 7: mod_base = OTHER; note = 2'-deoxy-2'-fluoroadenosine-3'-phosphate
  modified_base 8: mod_base = OTHER; note = 2'-O-methyladenosine-3'-phosphate
  modified_base 9: mod_base = OTHER; note = 2'-deoxy-2'-fluorocytidine-3'-phosphate
  modified_base 10: mod_base = OTHER; note = 2'-deoxy-2'-fluorouridine-3'-phosphate
  modified_base 11: mod_base = OTHER; note = 2'-deoxy-2'-fluoroguanosine-3'-phosphate
  modified_base 12: mod_base = OTHER; note = 2'-O-methyladenosine-3'-phosphate
  modified_base 13: mod_base = OTHER; note = 2'-O-methyladenosine-3'-phosphate
  modified_base 14: mod_base = OTHER; note = 2'-O-methyladenosine-3'-phosphate
  modified_base 15: mod_base = OTHER; note = 2'-O-methyladenosine-3'-phosphate
  modified_base 16: mod_base = OTHER; note = 2'-O-methylguanosine-3'-phosphate
  modified_base 17: mod_base = OTHER; note = 2'-O-methyluridine-3'-phosphate
  modified_base 18: mod_base = OTHER; note = 2'-O-methyluridine-3'-phosphate
  modified_base 19: mod_base = OTHER; note = 2'-O-methylguanosine-3'-phosphorothioate
  modified_base 20: mod_base = OTHER; note = 2'-O-methylguanosine-3'-phosphorothioate
  modified_base 21: mod_base = OTHER; note = 2'-O-methyladenosine
agattcaactgaaaagttgga

SEQ ID NO: 2160 - RNA, 21 nt, synthetic construct
  source 1..21: mol_type = other RNA
  modified_base 1: mod_base = OTHER; note = 2'-O-methyladenosine-3'-phosphorothioate
  modified_base 2: mod_base = OTHER; note = 2'-O-methyladenosine-3'-phosphorothioate
  modified_base 3: mod_base = OTHER; note = 2'-O-methylcytidine-3'-phosphate
  modified_base 4: mod_base = OTHER; note = 2'-O-methyluridine-3'-phosphate
  modified_base 5: mod_base = OTHER; note = 2'-O-methylguanosine-3'-phosphate
  modified_base 6: mod_base = OTHER; note = 2'-O-hexadecyl-adenosine-3'-phosphate
  modified_base 7: mod_base = OTHER; note = 2'-deoxy-2'-fluoroadenosine-3'-phosphate
  modified_base 8: mod_base = OTHER; note = 2'-O-methyladenosine-3'-phosphate
  modified_base 9: mod_base = OTHER; note = 2'-deoxy-2'-fluoroadenosine-3'-phosphate
  modified_base 10: mod_base = OTHER; note = 2'-deoxy-2'-fluoroguanosine-3'-phosphate
  modified_base 11: mod_base = OTHER; note = 2'-deoxy-2'-fluorouridine-3'-phosphate
  modified_base 12: mod_base = OTHER; note = 2'-O-methyluridine-3'-phosphate
  modified_base 13: mod_base = OTHER; note = 2'-O-methylguanosine-3'-phosphate
  modified_base 14: mod_base = OTHER; note = 2'-O-methylguanosine-3'-phosphate
  modified_base 15: mod_base = OTHER; note = 2'-O-methylcytidine-3'-phosphate
  modified_base 16: mod_base = OTHER; note = 2'-O-methyladenosine-3'-phosphate
  modified_base 17: mod_base = OTHER; note = 2'-O-methylguanosine-3'-phosphate
  modified_base 18: mod_base = OTHER; note = 2'-O-methyluridine-3'-phosphate
  modified_base 19: mod_base = OTHER; note = 2'-O-methyluridine-3'-phosphorothioate
  modified_base 20: mod_base = OTHER; note = 2'-O-methyladenosine-3'-phosphorothioate
  modified_base 21: mod_base = OTHER; note = 2'-O-methyladenosine
aactgaaaagttggcagttaa

SEQ ID NO: 2161 - RNA, 21 nt, synthetic construct
  source 1..21: mol_type = other RNA
  modified_base 1: mod_base = OTHER; note = 2'-O-methyladenosine-3'-phosphorothioate
  modified_base 2: mod_base = OTHER; note = 2'-O-methyladenosine-3'-phosphorothioate
  modified_base 3: mod_base = OTHER; note = 2'-O-methyladenosine-3'-phosphate
  modified_base 4: mod_base = OTHER; note = 2'-O-methylguanosine-3'-phosphate
  modified_base 5: mod_base = OTHER; note = 2'-O-methyluridine-3'-phosphate
  modified_base 6: mod_base = OTHER; note = 2'-O-hexadecyl-uridine-3'-phosphate
  modified_base 7: mod_base = OTHER; note = 2'-deoxy-2'-fluoroguanosine-3'-phosphate
  modified_base 8: mod_base = OTHER; note = 2'-O-methylguanosine-3'-phosphate
  modified_base 9: mod_base = OTHER; note = 2'-deoxy-2'-fluorocytidine-3'-phosphate
  modified_base 10: mod_base = OTHER; note = 2'-deoxy-2'-fluoroadenosine-3'-phosphate
  modified_base 11: mod_base = OTHER; note = 2'-deoxy-2'-fluoroguanosine-3'-phosphate
  modified_base 12: mod_base = OTHER; note = 2'-O-methyluridine-3'-phosphate
  modified_base 13: mod_base = OTHER; note = 2'-O-methyluridine-3'-phosphate
  modified_base 14: mod_base = OTHER; note = 2'-O-methyladenosine-3'-phosphate
  modified_base 15: mod_base = OTHER; note = 2'-O-methyluridine-3'-phosphate
  modified_base 16: mod_base = OTHER; note = 2'-O-methylguanosine-3'-phosphate
  modified_base 17: mod_base = OTHER; note = 2'-O-methylguanosine-3'-phosphate
  modified_base 18: mod_base = OTHER; note = 2'-O-methyluridine-3'-phosphate
  modified_base 19: mod_base = OTHER; note = 2'-O-methyluridine-3'-phosphorothioate
  modified_base 20: mod_base = OTHER; note = 2'-O-methyluridine-3'-phosphorothioate
  modified_base 21: mod_base = OTHER; note = 2'-O-methyladenosine
aaagttggcagttatggttta

SEQ ID NO: 2162 - RNA, 21 nt, synthetic construct
  source 1..21: mol_type = other RNA
  modified_base 1: mod_base = OTHER; note = 2'-O-methyluridine-3'-phosphorothioate
  modified_base 2: mod_base = OTHER; note = 2'-O-methylguanosine-3'-phosphorothioate
  modified_base 3: mod_base = OTHER; note = 2'-O-methylguanosine-3'-phosphate
  modified_base 4: mod_base = OTHER; note = 2'-O-methylcytidine-3'-phosphate
  modified_base 5: mod_base = OTHER; note = 2'-O-methyladenosine-3'-phosphate
  modified_base 6: mod_base = OTHER; note = 2'-O-hexadecyl-guanosine-3'-phosphate
  modified_base 7: mod_base = OTHER; note = 2'-deoxy-2'-fluorouridine-3'-phosphate
  modified_base 8: mod_base = OTHER; note = 2'-O-methyluridine-3'-phosphate
  modified_base 9: mod_base = OTHER; note = 2'-deoxy-2'-fluoroadenosine-3'-phosphate
  modified_base 10: mod_base = OTHER; note = 2'-deoxy-2'-fluorouridine-3'-phosphate
  modified_base 11: mod_base = OTHER; note = 2'-deoxy-2'-fluoroguanosine-3'-phosphate
  modified_base 12: mod_base = OTHER; note = 2'-O-methylguanosine-3'-phosphate
  modified_base 13: mod_base = OTHER; note = 2'-O-methyluridine-3'-phosphate
  modified_base 14: mod_base = OTHER; note = 2'-O-methyluridine-3'-phosphate
  modified_base 15: mod_base = OTHER; note = 2'-O-methyluridine-3'-phosphate
  modified_base 16: mod_base = OTHER; note = 2'-O-methyluridine-3'-phosphate
  modified_base 17: mod_base = OTHER; note = 2'-O-methylcytidine-3'-phosphate
  modified_base 18: mod_base = OTHER; note = 2'-O-methyluridine-3'-phosphate
  modified_base 19: mod_base = OTHER; note = 2'-O-methyluridine-3'-phosphorothioate
  modified_base 20: mod_base = OTHER; note = 2'-O-methyluridine-3'-phosphorothioate
  modified_base 21: mod_base = OTHER; note = 2'-O-methyladenosine
tggcagttatggttttcttta

SEQ ID NO: 2163 - RNA, 21 nt, synthetic construct
  source 1..21: mol_type = other RNA
  modified_base 1: mod_base = OTHER; note = 2'-O-methylguanosine-3'-phosphorothioate
  modified_base 2: mod_base = OTHER; note = 2'-O-methyluridine-3'-phosphorothioate
  modified_base 3: mod_base = OTHER; note = 2'-O-methyluridine-3'-phosphate
  modified_base 4: mod_base = OTHER; note = 2'-O-methyladenosine-3'-phosphate
  modified_base 5: mod_base = OTHER; note = 2'-O-methyluridine-3'-phosphate
  modified_base 6: mod_base = OTHER; note = 2'-O-hexadecyl-guanosine-3'-phosphate
  modified_base 7: mod_base = OTHER; note = 2'-deoxy-2'-fluoroguanosine-3'-phosphate
  modified_base 8: mod_base = OTHER; note = 2'-O-methyluridine-3'-phosphate
  modified_base 9: mod_base = OTHER; note = 2'-deoxy-2'-fluorouridine-3'-phosphate
  modified_base 10: mod_base = OTHER; note = 2'-deoxy-2'-fluorouridine-3'-phosphate
  modified_base 11: mod_base = OTHER; note = 2'-deoxy-2'-fluorouridine-3'-phosphate
  modified_base 12: mod_base = OTHER; note = 2'-O-methylcytidine-3'-phosphate
  modified_base 13: mod_base = OTHER; note = 2'-O-methyluridine-3'-phosphate
  modified_base 14: mod_base = OTHER; note = 2'-O-methyluridine-3'-phosphate
  modified_base 15: mod_base = OTHER; note = 2'-O-methyluridine-3'-phosphate
  modified_base 16: mod_base = OTHER; note = 2'-O-methylcytidine-3'-phosphate
  modified_base 17: mod_base = OTHER; note = 2'-O-methyladenosine-3'-phosphate
  modified_base 18: mod_base = OTHER; note = 2'-O-methyluridine-3'-phosphate
  modified_base 19: mod_base = OTHER; note = 2'-O-methylcytidine-3'-phosphorothioate
  modified_base 20: mod_base = OTHER; note = 2'-O-methyluridine-3'-phosphorothioate
  modified_base 21: mod_base = OTHER; note = 2'-O-methyladenosine
gttatggttttctttcatcta

SEQ ID NO: 2164 - RNA, 21 nt, synthetic construct
  source 1..21: mol_type = other RNA
  modified_base 1: mod_base = OTHER; note = 2'-O-methyluridine-3'-phosphorothioate
  modified_base 2: mod_base = OTHER; note = 2'-O-methyluridine-3'-phosphorothioate
  modified_base 3: mod_base = OTHER; note = 2'-O-methylcytidine-3'-phosphate
  modified_base 4: mod_base = OTHER; note = 2'-O-methyluridine-3'-phosphate
  modified_base 5: mod_base = OTHER; note = 2'-O-methyluridine-3'-phosphate
  modified_base 6: mod_base = OTHER; note = 2'-O-hexadecyl-uridine-3'-phosphate
  modified_base 7: mod_base = OTHER; note = 2'-deoxy-2'-fluorocytidine-3'-phosphate
  modified_base 8: mod_base = OTHER; note = 2'-O-methyladenosine-3'-phosphate
  modified_base 9: mod_base = OTHER; note = 2'-deoxy-2'-fluorouridine-3'-phosphate
  modified_base 10: mod_base = OTHER; note = 2'-deoxy-2'-fluorocytidine-3'-phosphate
  modified_base 11: mod_base = OTHER; note = 2'-deoxy-2'-fluorouridine-3'-phosphate
  modified_base 12: mod_base = OTHER; note = 2'-O-methylguanosine-3'-phosphate
  modified_base 13: mod_base = OTHER; note = 2'-O-methyladenosine-3'-phosphate
  modified_base 14: mod_base = OTHER; note = 2'-O-methyluridine-3'-phosphate
  modified_base 15: mod_base = OTHER; note = 2'-O-methylguanosine-3'-phosphate
  modified_base 16: mod_base = OTHER; note = 2'-O-methyluridine-3'-phosphate
  modified_base 17: mod_base = OTHER; note = 2'-O-methylguanosine-3'-phosphate
  modified_base 18: mod_base = OTHER; note = 2'-O-methyluridine-3'-phosphate
  modified_base 19: mod_base = OTHER; note = 2'-O-methylcytidine-3'-phosphorothioate
  modified_base 20: mod_base = OTHER; note = 2'-O-methyladenosine-3'-phosphorothioate
  modified_base 21: mod_base = OTHER; note = 2'-O-methyladenosine
ttctttcatctgatgtgtcaa

SEQ ID NO: 2165 - RNA, 21 nt, synthetic construct
  source 1..21: mol_type = other RNA
  modified_base 1: mod_base = OTHER; note = 2'-O-methylcytidine-3'-phosphorothioate
  modified_base 2: mod_base = OTHER; note = 2'-O-methyladenosine-3'-phosphorothioate
  modified_base 3: mod_base = OTHER; note = 2'-O-methyluridine-3'-phosphate
  modified_base 4: mod_base = OTHER; note = 2'-O-methylcytidine-3'-phosphate
  modified_base 5: mod_base = OTHER; note = 2'-O-methyluridine-3'-phosphate
  modified_base 6: mod_base = OTHER; note = 2'-O-hexadecyl-guanosine-3'-phosphate
  modified_base 7: mod_base = OTHER; note = 2'-deoxy-2'-fluoroadenosine-3'-phosphate
  modified_base 8: mod_base = OTHER; note = 2'-O-methyluridine-3'-phosphate
  modified_base 9: mod_base = OTHER; note = 2'-deoxy-2'-fluoroguanosine-3'-phosphate
  modified_base 10: mod_base = OTHER; note = 2'-deoxy-2'-fluorouridine-3'-phosphate
  modified_base 11: mod_base = OTHER; note = 2'-deoxy-2'-fluoroguanosine-3'-phosphate
  modified_base 12: mod_base = OTHER; note = 2'-O-methyluridine-3'-phosphate
  modified_base 13: mod_base = OTHER; note = 2'-O-methylcytidine-3'-phosphate
  modified_base 14: mod_base = OTHER; note = 2'-O-methyladenosine-3'-phosphate
  modified_base 15: mod_base = OTHER; note = 2'-O-methylguanosine-3'-phosphate
  modified_base 16: mod_base = OTHER; note = 2'-O-methyluridine-3'-phosphate
  modified_base 17: mod_base = OTHER; note = 2'-O-methyladenosine-3'-phosphate
  modified_base 18: mod_base = OTHER; note = 2'-O-methyluridine-3'-phosphate
  modified_base 19: mod_base = OTHER; note = 2'-O-methylcytidine-3'-phosphorothioate
  modified_base 20: mod_base = OTHER; note = 2'-O-methyluridine-3'-phosphorothioate
  modified_base 21: mod_base = OTHER; note = 2'-O-methyladenosine
catctgatgtgtcagtatcta

SEQ ID NO: 2166 - RNA, 21 nt, synthetic construct
  source 1..21: mol_type = other RNA
  modified_base 1: mod_base = OTHER; note = 2'-O-methyladenosine-3'-phosphorothioate
  modified_base 2: mod_base = OTHER; note = 2'-O-methyluridine-3'-phosphorothioate
  modified_base 3: mod_base = OTHER; note = 2'-O-methylguanosine-3'-phosphate
  modified_base 4: mod_base = OTHER; note = 2'-O-methyluridine-3'-phosphate
  modified_base 5: mod_base = OTHER; note = 2'-O-methylguanosine-3'-phosphate
  modified_base 6: mod_base = OTHER; note = 2'-O-hexadecyl-uridine-3'-phosphate
  modified_base 7: mod_base = OTHER; note = 2'-deoxy-2'-fluorocytidine-3'-phosphate
  modified_base 8: mod_base = OTHER; note = 2'-O-methyladenosine-3'-phosphate
  modified_base 9: mod_base = OTHER; note = 2'-deoxy-2'-fluoroguanosine-3'-phosphate
  modified_base 10: mod_base = OTHER; note = 2'-deoxy-2'-fluorouridine-3'-phosphate
  modified_base 11: mod_base = OTHER; note = 2'-deoxy-2'-fluoroadenosine-3'-phosphate
  modified_base 12: mod_base = OTHER; note = 2'-O-methyluridine-3'-phosphate
  modified_base 13: mod_base = OTHER; note = 2'-O-methylcytidine-3'-phosphate
  modified_base 14: mod_base = OTHER; note = 2'-O-methyluridine-3'-phosphate
  modified_base 15: mod_base = OTHER; note = 2'-O-methylguanosine-3'-phosphate
  modified_base 16: mod_base = OTHER; note = 2'-O-methyluridine-3'-phosphate
  modified_base 17: mod_base = OTHER; note = 2'-O-methyluridine-3'-phosphate
  modified_base 18: mod_base = OTHER; note = 2'-O-methylguanosine-3'-phosphate
  modified_base 19: mod_base = OTHER; note = 2'-O-methyladenosine-3'-phosphorothioate
  modified_base 20: mod_base = OTHER; note = 2'-O-methyluridine-3'-phosphorothioate
  modified_base 21: mod_base = OTHER; note = 2'-O-methyladenosine
atgtgtcagtatctgttgata

SEQ ID NO: 2167 - RNA, 21 nt, synthetic construct
  source 1..21: mol_type = other RNA
  modified_base 1: mod_base = OTHER; note = 2'-O-methylcytidine-3'-phosphorothioate
  modified_base 2: mod_base = OTHER; note = 2'-O-methyladenosine-3'-phosphorothioate
  modified_base 3: mod_base = OTHER; note = 2'-O-methylguanosine-3'-phosphate
  modified_base 4: mod_base = OTHER; note = 2'-O-methyluridine-3'-phosphate
  modified_base 5: mod_base = OTHER; note = 2'-O-methyladenosine-3'-phosphate
  modified_base 6: mod_base = OTHER; note = 2'-O-hexadecyl-uridine-3'-phosphate
  modified_base 7: mod_base = OTHER; note = 2'-deoxy-2'-fluorocytidine-3'-phosphate
  modified_base 8: mod_base = OTHER; note = 2'-O-methyluridine-3'-phosphate
  modified_base 9: mod_base = OTHER; note = 2'-deoxy-2'-fluoroguanosine-3'-phosphate
  modified_base 10: mod_base = OTHER; note = 2'-deoxy-2'-fluorouridine-3'-phosphate
  modified_base 11: mod_base = OTHER; note = 2'-deoxy-2'-fluorouridine-3'-phosphate
  modified_base 12: mod_base = OTHER; note = 2'-O-methylguanosine-3'-phosphate
  modified_base 13: mod_base = OTHER; note = 2'-O-methyladenosine-3'-phosphate
  modified_base 14: mod_base = OTHER; note = 2'-O-methyluridine-3'-phosphate
  modified_base 15: mod_base = OTHER; note = 2'-O-methyluridine-3'-phosphate
  modified_base 16: mod_base = OTHER; note = 2'-O-methyluridine-3'-phosphate
  modified_base 17: mod_base = OTHER; note = 2'-O-methylguanosine-3'-phosphate
  modified_base 18: mod_base = OTHER; note = 2'-O-methylcytidine-3'-phosphate
  modified_base 19: mod_base = OTHER; note = 2'-O-methyluridine-3'-phosphorothioate
  modified_base 20: mod_base = OTHER; note = 2'-O-methyluridine-3'-phosphorothioate
  modified_base 21: mod_base = OTHER; note = 2'-O-methyladenosine
cagtatctgttgatttgctta

SEQ ID NO: 2168 - RNA, 21 nt, synthetic construct
  source 1..21: mol_type = other RNA
  modified_base 1: mod_base = OTHER; note = 2'-O-methylguanosine-3'-phosphorothioate
  modified_base 2: mod_base = OTHER; note = 2'-O-methyluridine-3'-phosphorothioate
  modified_base 3: mod_base = OTHER; note = 2'-O-methyluridine-3'-phosphate
  modified_base 4: mod_base = OTHER; note = 2'-O-methylguanosine-3'-phosphate
  modified_base 5: mod_base = OTHER; note = 2'-O-methyladenosine-3'-phosphate
  modified_base 6: mod_base = OTHER; note = 2'-O-hexadecyl-uridine-3'-phosphate
  modified_base 7: mod_base = OTHER; note = 2'-deoxy-2'-fluorouridine-3'-phosphate
  modified_base 8: mod_base = OTHER; note = 2'-O-methyluridine-3'-phosphate
  modified_base 9: mod_base = OTHER; note = 2'-deoxy-2'-fluoroguanosine-3'-phosphate
  modified_base 10: mod_base = OTHER; note = 2'-deoxy-2'-fluorocytidine-3'-phosphate
  modified_base 11: mod_base = OTHER; note = 2'-deoxy-2'-fluorouridine-3'-phosphate
  modified_base 12: mod_base = OTHER; note = 2'-O-methyluridine-3'-phosphate
  modified_base 13: mod_base = OTHER; note = 2'-O-methyluridine-3'-phosphate
  modified_base 14: mod_base = OTHER; note = 2'-O-methylguanosine-3'-phosphate
  modified_base 15: mod_base = OTHER; note = 2'-O-methyluridine-3'-phosphate
  modified_base 16: mod_base = OTHER; note = 2'-O-methyladenosine-3'-phosphate
  modified_base 17: mod_base = OTHER; note = 2'-O-methylguanosine-3'-phosphate
  modified_base 18: mod_base = OTHER; note = 2'-O-methyluridine-3'-phosphate
  modified_base 19: mod_base = OTHER; note = 2'-O-methyluridine-3'-phosphorothioate
  modified_base 20: mod_base = OTHER; note = 2'-O-methyluridine-3'-phosphorothioate
  modified_base 21: mod_base = OTHER; note = 2'-O-methyladenosine
gttgatttgctttgtagttta

SEQ ID NO: 2169 - RNA, 21 nt, synthetic construct
  source 1..21: mol_type = other RNA
  modified_base 1: mod_base = OTHER; note = 2'-O-methylguanosine-3'-phosphorothioate
  modified_base 2: mod_base = OTHER; note = 2'-O-methylcytidine-3'-phosphorothioate
  modified_base 3: mod_base = OTHER; note = 2'-O-methyluridine-3'-phosphate
  modified_base 4: mod_base = OTHER; note = 2'-O-methyluridine-3'-phosphate
  modified_base 5: mod_base = OTHER; note = 2'-O-methyluridine-3'-phosphate
  modified_base 6: mod_base = OTHER; note = 2'-O-hexadecyl-guanosine-3'-phosphate
  modified_base 7: mod_base = OTHER; note = 2'-deoxy-2'-fluorouridine-3'-phosphate
  modified_base 8: mod_base = OTHER; note = 2'-O-methyladenosine-3'-phosphate
  modified_base 9: mod_base = OTHER; note = 2'-deoxy-2'-fluoroguanosine-3'-phosphate
  modified_base 10: mod_base = OTHER; note = 2'-deoxy-2'-fluorouridine-3'-phosphate
  modified_base 11: mod_base = OTHER; note = 2'-deoxy-2'-fluorouridine-3'-phosphate
  modified_base 12: mod_base = OTHER; note = 2'-O-methyluridine-3'-phosphate
  modified_base 13: mod_base = OTHER; note = 2'-O-methylguanosine-3'-phosphate
  modified_base 14: mod_base = OTHER; note = 2'-O-methyluridine-3'-phosphate
  modified_base 15: mod_base = OTHER; note = 2'-O-methyluridine-3'-phosphate
  modified_base 16: mod_base = OTHER; note = 2'-O-methylguanosine-3'-phosphate
  modified_base 17: mod_base = OTHER; note = 2'-O-methyladenosine-3'-phosphate
  modified_base 18: mod_base = OTHER; note = 2'-O-methylcytidine-3'-phosphate
  modified_base 19: mod_base = OTHER; note = 2'-O-methyladenosine-3'-phosphorothioate
  modified_base 20: mod_base = OTHER; note = 2'-O-methyluridine-3'-phosphorothioate
  modified_base 21: mod_base = OTHER; note = 2'-O-methyladenosine
gctttgtagtttgttgacata

SEQ ID NO: 2170 - RNA, 21 nt, synthetic construct
  source 1..21: mol_type = other RNA
  modified_base 1: mod_base = OTHER; note = 2'-O-methylguanosine-3'-phosphorothioate
  modified_base 2: mod_base = OTHER; note = 2'-O-methyluridine-3'-phosphorothioate
  modified_base 3: mod_base = OTHER; note = 2'-O-methyladenosine-3'-phosphate
  modified_base 4: mod_base = OTHER; note = 2'-O-methylguanosine-3'-phosphate
  modified_base 5: mod_base = OTHER; note = 2'-O-methyluridine-3'-phosphate
  modified_base 6: mod_base = OTHER; note = 2'-O-hexadecyl-uridine-3'-phosphate
  modified_base 7: mod_base = OTHER; note = 2'-deoxy-2'-fluorouridine-3'-phosphate
  modified_base 8: mod_base = OTHER; note = 2'-O-methylguanosine-3'-phosphate
  modified_base 9: mod_base = OTHER; note = 2'-deoxy-2'-fluorouridine-3'-phosphate
  modified_base 10: mod_base = OTHER; note = 2'-deoxy-2'-fluorouridine-3'-phosphate
  modified_base 11: mod_base = OTHER; note = 2'-deoxy-2'-fluoroguanosine-3'-phosphate
  modified_base 12: mod_base = OTHER; note = 2'-O-methyladenosine-3'-phosphate
  modified_base 13: mod_base = OTHER; note = 2'-O-methylcytidine-3'-phosphate
  modified_base 14: mod_base = OTHER; note = 2'-O-methyladenosine-3'-phosphate
  modified_base 15: mod_base = OTHER; note = 2'-O-methyluridine-3'-phosphate
  modified_base 16: mod_base = OTHER; note = 2'-O-methylcytidine-3'-phosphate
  modified_base 17: mod_base = OTHER; note = 2'-O-methyluridine-3'-phosphate
  modified_base 18: mod_base = OTHER; note = 2'-O-methyluridine-3'-phosphate
  modified_base 19: mod_base = OTHER; note = 2'-O-methyladenosine-3'-phosphorothioate
  modified_base 20: mod_base = OTHER; note = 2'-O-methyladenosine-3'-phosphorothioate
  modified_base 21: mod_base = OTHER; note = 2'-O-methyladenosine
gtagtttgttgacatcttaaa

SEQ ID NO: 2171 - RNA, 21 nt, synthetic construct
  source 1..21: mol_type = other RNA
  modified_base 1: mod_base = OTHER; note = 2'-O-methyluridine-3'-phosphorothioate
  modified_base 2: mod_base = OTHER; note = 2'-O-methyluridine-3'-phosphorothioate
  modified_base 3: mod_base = OTHER; note = 2'-O-methylguanosine-3'-phosphate
  modified_base 4: mod_base = OTHER; note = 2'-O-methyluridine-3'-phosphate
  modified_base 5: mod_base = OTHER; note = 2'-O-methyluridine-3'-phosphate
  modified_base 6: mod_base = OTHER; note = 2'-O-hexadecyl-guanosine-3'-phosphate
  modified_base 7: mod_base = OTHER; note = 2'-deoxy-2'-fluoroadenosine-3'-phosphate
  modified_base 8: mod_base = OTHER; note = 2'-O-methylcytidine-3'-phosphate
  modified_base 9: mod_base = OTHER; note = 2'-deoxy-2'-fluoroadenosine-3'-phosphate
  modified_base 10: mod_base = OTHER; note = 2'-deoxy-2'-fluorouridine-3'-phosphate
  modified_base 11: mod_base = OTHER; note = 2'-deoxy-2'-fluorocytidine-3'-phosphate
  modified_base 12: mod_base = OTHER; note = 2'-O-methyluridine-3'-phosphate
  modified_base 13: mod_base = OTHER; note = 2'-O-methyluridine-3'-phosphate
  modified_base 14: mod_base = OTHER; note = 2'-O-methyladenosine-3'-phosphate
  modified_base 15: mod_base = OTHER; note = 2'-O-methyladenosine-3'-phosphate
  modified_base 16: mod_base = OTHER; note = 2'-O-methylguanosine-3'-phosphate
  modified_base 17: mod_base = OTHER; note = 2'-O-methyladenosine-3'-phosphate
  modified_base 18: mod_base = OTHER; note = 2'-O-methyluridine-3'-phosphate
  modified_base 19: mod_base = OTHER; note = 2'-O-methyluridine-3'-phosphorothioate
  modified_base 20: mod_base = OTHER; note = 2'-O-methyluridine-3'-phosphorothioate
  modified_base 21: mod_base = OTHER; note = 2'-O-methyladenosine
ttgttgacatcttaagattta

SEQ ID NO: 2172 - RNA, 21 nt, synthetic construct
  source 1..21: mol_type = other RNA
  modified_base 1: mod_base = OTHER; note = 2'-O-methylguanosine-3'-phosphorothioate
  modified_base 2: mod_base = OTHER; note = 2'-O-methyladenosine-3'-phosphorothioate
  modified_base 3: mod_base = OTHER; note = 2'-O-methylcytidine-3'-phosphate
  modified_base 4: mod_base = OTHER; note = 2'-O-methyladenosine-3'-phosphate
  modified_base 5: mod_base = OTHER; note = 2'-O-methyluridine-3'-phosphate
  modified_base 6: mod_base = OTHER; note = 2'-O-hexadecyl-cytidine-3'-phosphate
  modified_base 7: mod_base = OTHER; note = 2'-deoxy-2'-fluorouridine-3'-phosphate
  modified_base 8: mod_base = OTHER; note = 2'-O-methyluridine-3'-phosphate
  modified_base 9: mod_base = OTHER; note = 2'-deoxy-2'-fluoroadenosine-3'-phosphate
  modified_base 10: mod_base = OTHER; note = 2'-deoxy-2'-fluoroadenosine-3'-phosphate
  modified_base 11: mod_base = OTHER; note = 2'-deoxy-2'-fluoroguanosine-3'-phosphate
  modified_base 12: mod_base = OTHER; note = 2'-O-methyladenosine-3'-phosphate
  modified_base 13: mod_base = OTHER; note = 2'-O-methyluridine-3'-phosphate
  modified_base 14: mod_base = OTHER; note = 2'-O-methyluridine-3'-phosphate
  modified_base 15: mod_base = OTHER; note = 2'-O-methyluridine-3'-phosphate
  modified_base 16: mod_base = OTHER; note = 2'-O-methylguanosine-3'-phosphate
  modified_base 17: mod_base = OTHER; note = 2'-O-methyladenosine-3'-phosphate
  modified_base 18: mod_base = OTHER; note = 2'-O-methyluridine-3'-phosphate
  modified_base 19: mod_base = OTHER; note = 2'-O-methylguanosine-3'-phosphorothioate
  modified_base 20: mod_base = OTHER; note = 2'-O-methyluridine-3'-phosphorothioate
  modified_base 21: mod_base = OTHER; note = 2'-O-methyladenosine
gacatcttaagatttgatgta

SEQ ID NO: 2173 - RNA, 21 nt, synthetic construct
  source 1..21: mol_type = other RNA
  modified_base 1: mod_base = OTHER; note = 2'-O-methyluridine-3'-phosphorothioate
  modified_base 2: mod_base = OTHER; note = 2'-O-methyluridine-3'-phosphorothioate
  modified_base 3: mod_base = OTHER; note = 2'-O-methyladenosine-3'-phosphate
  modified_base 4: mod_base = OTHER; note = 2'-O-methyladenosine-3'-phosphate
  modified_base 5: mod_base = OTHER; note = 2'-O-methylguanosine-3'-phosphate
  modified_base 6: mod_base = OTHER; note = 2'-O-hexadecyl-adenosine-3'-phosphate
  modified_base 7: mod_base = OTHER; note = 2'-deoxy-2'-fluorouridine-3'-phosphate
  modified_base 8: mod_base = OTHER; note = 2'-O-methyluridine-3'-phosphate
  modified_base 9: mod_base = OTHER; note = 2'-deoxy-2'-fluorouridine-3'-phosphate
  modified_base 10: mod_base = OTHER; note = 2'-deoxy-2'-fluoroguanosine-3'-phosphate
  modified_base 11: mod_base = OTHER; note = 2'-deoxy-2'-fluoroadenosine-3'-phosphate
  modified_base 12: mod_base = OTHER; note = 2'-O-methyluridine-3'-phosphate
  modified_base 13: mod_base = OTHER; note = 2'-O-methylguanosine-3'-phosphate
  modified_base 14: mod_base = OTHER; note = 2'-O-methyluridine-3'-phosphate
  modified_base 15: mod_base = OTHER; note = 2'-O-methylguanosine-3'-phosphate
  modified_base 16: mod_base = OTHER; note = 2'-O-methyladenosine-3'-phosphate
  modified_base 17: mod_base = OTHER; note = 2'-O-methyladenosine-3'-phosphate
  modified_base 18: mod_base = OTHER; note = 2'-O-methyladenosine-3'-phosphate
  modified_base 19: mod_base = OTHER; note = 2'-O-methylguanosine-3'-phosphorothioate
  modified_base 20: mod_base = OTHER; note = 2'-O-methyluridine-3'-phosphorothioate
  modified_base 21: mod_base = OTHER; note = 2'-O-methyladenosine
ttaagatttgatgtgaaagta

SEQ ID NO: 2174 - RNA, 21 nt, synthetic construct
  source 1..21: mol_type = other RNA
  modified_base 1: mod_base = OTHER; note = 2'-O-methyluridine-3'-phosphorothioate
  modified_base 2: mod_base = OTHER; note = 2'-O-methyluridine-3'-phosphorothioate
  modified_base 3: mod_base = OTHER; note = 2'-O-methyluridine-3'-phosphate
  modified_base 4: mod_base = OTHER; note = 2'-O-methylguanosine-3'-phosphate
  modified_base 5: mod_base = OTHER; note = 2'-O-methyladenosine-3'-phosphate
  modified_base 6: mod_base = OTHER; note = 2'-O-hexadecyl-uridine-3'-phosphate
  modified_base 7: mod_base = OTHER; note = 2'-deoxy-2'-fluoroguanosine-3'-phosphate
  modified_base 8: mod_base = OTHER; note = 2'-O-methyluridine-3'-phosphate
  modified_base 9: mod_base = OTHER; note = 2'-deoxy-2'-fluoroguanosine-3'-phosphate
  modified_base 10: mod_base = OTHER; note = 2'-deoxy-2'-fluoroadenosine-3'-phosphate
  modified_base 11: mod_base = OTHER; note = 2'-deoxy-2'-fluoroadenosine-3'-phosphate
  modified_base 12: mod_base = OTHER; note = 2'-O-methyladenosine-3'-phosphate
  modified_base 13: mod_base = OTHER; note = 2'-O-methylguanosine-3'-phosphate
  modified_base 14: mod_base = OTHER; note = 2'-O-methyluridine-3'-phosphate
  modified_base 15: mod_base = OTHER; note = 2'-O-methyluridine-3'-phosphate
  modified_base 16: mod_base = OTHER; note = 2'-O-methyluridine-3'-phosphate
  modified_base 17: mod_base = OTHER; note = 2'-O-methyluridine-3'-phosphate
  modified_base 18: mod_base = OTHER; note = 2'-O-methyladenosine-3'-phosphate
  modified_base 19: mod_base = OTHER; note = 2'-O-methylguanosine-3'-phosphorothioate
  modified_base 20: mod_base = OTHER; note = 2'-O-methyladenosine-3'-phosphorothioate
  modified_base 21: mod_base = OTHER; note = 2'-O-methyladenosine
tttgatgtgaaagttttagaa

SEQ ID NO: 2175 - RNA, 23 nt, synthetic construct
  source 1..23: mol_type = other RNA
cgatggcgatgatgcctctagtc

SEQ ID NO: 2176 - RNA, 23 nt, synthetic construct
  source 1..23: mol_type = other RNA
gatgatgcctctagtcctgcatc

SEQ ID NO: 2177 - RNA, 23 nt, synthetic construct
  source 1..23: mol_type = other RNA
tgcctctagtcctgcatcatcca

SEQ ID NO: 2178 - RNA, 23 nt, synthetic construct
  source 1..23: mol_type = other RNA
tagtcctgcatcatccagagcgg

SEQ ID NO: 2179 - RNA, 23 nt, synthetic construct
  source 1..23: mol_type = other RNA
gtccggactgcgagatggaggag

SEQ ID NO: 2180 - RNA, 23 nt, synthetic construct
  source 1..23: mol_type = other RNA
gccacccggcaggcttatctgtc

SEQ ID NO: 2181 - RNA, 23 nt, synthetic construct
  source 1..23: mol_type = other RNA
ccggcaggcttatctgtcttggg

SEQ ID NO: 2182 - RNA, 23 nt, synthetic construct
  source 1..23: mol_type = other RNA
ttatctgtcttgggcctcttttg

SEQ ID NO: 2183 - RNA, 23 nt, synthetic construct
  source 1..23: mol_type = other RNA
tgtcttgggcctcttttgtcaca

SEQ ID NO: 2184 - RNA, 23 nt, synthetic construct
  source 1..23: mol_type = other RNA
tgggcctcttttgtcacatattg

SEQ ID NO: 2185 - RNA, 23 nt, synthetic construct
  source 1..23: mol_type = other RNA
tcttttgtcacatattgctcatc

SEQ ID NO: 2186 - RNA, 23 nt, synthetic construct
  source 1..23: mol_type = other RNA
gtcacatattgctcatctgtgag

SEQ ID NO: 2187 - RNA, 23 nt, synthetic construct
  source 1..23: mol_type = other RNA
atattgctcatctgtgagctgag

SEQ ID NO: 2188 - RNA, 23 nt, synthetic construct
  source 1..23: mol_type = other RNA
ctcatctgtgagctgaggccctg

SEQ ID NO: 2189 - RNA, 23 nt, synthetic construct
  source 1..23: mol_type = other RNA
gaggccctgactcactgagtatt

SEQ ID NO: 2190 - RNA, 23 nt, synthetic construct
  source 1..23: mol_type = other RNA
cctgactcactgagtatttttgg

SEQ ID NO: 2191 - RNA, 23 nt, synthetic construct
  source 1..23: mol_type = other RNA
gggagcagaagaaggagacattt

SEQ ID NO: 2192 - RNA, 23 nt, synthetic construct
  source 1..23: mol_type = other RNA
cagaagaaggagacatttctctc

SEQ ID NO: 2193 - RNA, 23 nt, synthetic construct
  source 1..23: mol_type = other RNA
aaggagacatttctctccgaaaa

SEQ ID NO: 2194 - RNA, 23 nt, synthetic construct
  source 1..23: mol_type = other RNA
catttctctccgaaaatgaactc

SEQ ID NO: 2195 - RNA, 23 nt, synthetic construct
  source 1..23: mol_type = other RNA
ctctccgaaaatgaactcaacag

SEQ ID NO: 2196 - RNA, 23 nt, synthetic construct
  source 1..23: mol_type = other RNA
cgaaaatgaactcaacaggccac

SEQ ID NO: 2197 - RNA, 23 nt, synthetic construct
  source 1..23: mol_type = other RNA
atgaactcaacaggccaccttca

SEQ ID NO: 2198 - RNA, 23 nt, synthetic construct
  source 1..23: mol_type = other RNA
caacaggccaccttcaggatgcc

SEQ ID NO: 2199 - RNA, 23 nt, synthetic construct
  source 1..23: mol_type = other RNA
tgccacctcgctccatgtgcctc

SEQ ID NO: 2200 - RNA, 23 nt, synthetic construct
  source 1..23: mol_type = other RNA
cctcgctccatgtgcctcactca

SEQ ID NO: 2201 - RNA, 23 nt, synthetic construct
  source 1..23: mol_type = other RNA
ccatgtgcctcactcacaggaag

SEQ ID NO: 2202 - RNA, 23 nt, synthetic construct
  source 1..23: mol_type = other RNA
tgcctcactcacaggaaggaaac

SEQ ID NO: 2203 - RNA, 23 nt, synthetic construct
  source 1..23: mol_type = other RNA
tcacaggaaggaaacagcacctc

SEQ ID NO: 2204 - RNA, 23 nt, synthetic construct
  source 1..23: mol_type = other RNA
ggaaggaaacagcacctctctcc

SEQ ID NO: 2205 - RNA, 23 nt, synthetic construct
  source 1..23: mol_type = other RNA
ctctctccaggagggtcttcagg

SEQ ID NO: 2206 - RNA, 23 nt, synthetic construct
  source 1..23: mol_type = other RNA
tccaggagggtcttcaggatctc

SEQ ID NO: 2207 - RNA, 23 nt, synthetic construct
  source 1..23: mol_type = other RNA
agggtcttcaggatctcatccac

SEQ ID NO: 2208 - RNA, 23 nt, synthetic construct
  source 1..23: mol_type = other RNA
cttcaggatctcatccacacagc

SEQ ID NO: 2209 - RNA, 23 nt, synthetic construct
  source 1..23: mol_type = other RNA
tctcatccacacagccaccttgg

SEQ ID NO: 2210 - RNA, 23 nt, synthetic construct
  source 1..23: mol_type = other RNA
tccacacagccaccttggtgacc

SEQ ID NO: 2211 - RNA, 23 nt, synthetic construct
  source 1..23: mol_type = other RNA
acagccaccttggtgacctgtac

SEQ ID NO: 2212 - RNA, 23 nt, synthetic construct
  source 1..23: mol_type = other RNA
caccttggtgacctgtacttttc

SEQ ID NO: 2213 - RNA, 23 nt, synthetic construct
  source 1..23: mol_type = other RNA
tggtgacctgtacttttctactg

SEQ ID NO: 2214 - RNA, 23 nt, synthetic construct
  source 1..23: mol_type = other RNA
gtacttttctactggcggtcatc

SEQ ID NO: 2215 - RNA, 23 nt, synthetic construct
  source 1..23: mol_type = other RNA
tttctactggcggtcatcttctg

SEQ ID NO: 2216 - RNA, 23 nt, synthetic construct
  source 1..23: mol_type = other RNA
gcggtcatcttctgcctgggttc

SEQ ID NO: 2217 - RNA, 23 nt, synthetic construct
  source 1..23: mol_type = other RNA
tcttctgcctgggttcctatggc

SEQ ID NO: 2218 - RNA, 23 nt, synthetic construct
  source 1..23: mol_type = other RNA
tgcctgggttcctatggcaactt

SEQ ID NO: 2219 - RNA, 23 nt, synthetic construct
  source 1..23: mol_type = other RNA
gggttcctatggcaacttcattg

SEQ ID NO: 2220 - RNA, 23 nt, synthetic construct
  source 1..23: mol_type = other RNA
cctatggcaacttcattgtcttc

SEQ ID NO: 2221 - RNA, 23 nt, synthetic construct
  source 1..23: mol_type = other RNA
ggcaacttcattgtcttcttgtc

SEQ ID NO: 2222 - RNA, 23 nt, synthetic construct
  source 1..23: mol_type = other RNA
cttcattgtcttcttgtccttct

SEQ ID NO: 2223 - RNA, 23 nt, synthetic construct
  source 1..23: mol_type = other RNA
ttgtcttcttgtccttcttcgat

SEQ ID NO: 2224 - RNA, 23 nt, synthetic construct
  source 1..23: mol_type = other RNA
ttcttgtccttcttcgatccagc

SEQ ID NO: 2225 - RNA, 23 nt, synthetic construct
  source 1..23: mol_type = other RNA
gtccttcttcgatccagccttca

SEQ ID NO: 2226 - RNA, 23 nt, synthetic construct
  source 1..23: mol_type = other RNA
tcgatccagccttcaggaaattc

SEQ ID NO: 2227 - RNA, 23 nt, synthetic construct
  source 1..23: mol_type = other RNA
ccagccttcaggaaattcagaac

SEQ ID NO: 2228 - RNA, 23 nt, synthetic construct
  source 1..23: mol_type = other RNA
cttcaggaaattcagaaccaact

SEQ ID NO: 2229 - RNA, 23 nt, synthetic construct
  source 1..23: mol_type = other RNA
aaattcagaaccaactttgattt

SEQ ID NO: 2230 - RNA, 23 nt, synthetic construct
  source 1..23: mol_type = other RNA
agaaccaactttgatttcatgat

SEQ ID NO: 2231 - RNA, 23 nt, synthetic construct
  source 1..23: mol_type = other RNA
actttgatttcatgatcctgaac

SEQ ID NO: 2232 - RNA, 23 nt, synthetic construct
  source 1..23: mol_type = other RNA
atttcatgatcctgaacctgtcc

SEQ ID NO: 2233 - RNA, 23 nt, synthetic construct
  source 1..23: mol_type = other RNA
atgatcctgaacctgtccttctg

SEQ ID NO: 2234 - RNA, 23 nt, synthetic construct
  source 1..23: mol_type = other RNA
ctgaacctgtccttctgtgacct

SEQ ID NO: 2235 - RNA, 23 nt, synthetic construct
  source 1..23: mol_type = other RNA
cctgtccttctgtgacctcttca

SEQ ID NO: 2236 - RNA, 23 nt, synthetic construct
  source 1..23: mol_type = other RNA
ccttctgtgacctcttcatttgt

SEQ ID NO: 2237 - RNA, 23 nt, synthetic construct
  source 1..23: mol_type = other RNA
gtgacctcttcatttgtggagtg

SEQ ID NO: 2238 - RNA, 23 nt, synthetic construct
  source 1..23: mol_type = other RNA
ctcttcatttgtggagtgacagc

SEQ ID NO: 2239 - RNA, 23 nt, synthetic construct
  source 1..23: mol_type = other RNA
cccatgttcacctttgtgttatt

SEQ ID NO: 2240 - RNA, 23 nt, synthetic construct
  source 1..23: mol_type = other RNA
gttcacctttgtgttattcttca

SEQ ID NO: 2241 - RNA, 23 nt, synthetic construct
  source 1..23: mol_type = other RNA
cctttgtgttattcttcagctca

SEQ ID NO: 2242 - RNA, 23 nt, synthetic construct
  source 1..23: mol_type = other RNA
gtgttattcttcagctcagccag

SEQ ID NO: 2243 - RNA, 23 nt, synthetic construct
  source 1..23: mol_type = other RNA
ttcagctcagccagtagtatccc

SEQ ID NO: 2244 - RNA, 23 nt, synthetic construct
  source 1..23: mol_type = other RNA
ctcagccagtagtatcccggatg

SEQ ID NO: 2245 - RNA, 23 nt, synthetic construct
  source 1..23: mol_type = other RNA
agtagtatcccggatgctttctg

SEQ ID NO: 2246 - RNA, 23 nt, synthetic construct
  source 1..23: mol_type = other RNA
tatcccggatgctttctgcttca

SEQ ID NO: 2247 - RNA, 23 nt, synthetic construct
  source 1..23: mol_type = other RNA
cggatgctttctgcttcactttc

SEQ ID NO: 2248 - RNA, 23 nt, synthetic construct
  source 1..23: mol_type = other RNA
gctttctgcttcactttccatct

SEQ ID NO: 2249 - RNA, 23 nt, synthetic construct
  source 1..23: mol_type = other RNA
ttcactttccatctcaccagttc

SEQ ID NO: 2250 - RNA, 23 nt, synthetic construct
  source 1..23: mol_type = other RNA
ttccatctcaccagttcaggctt

SEQ ID NO: 2251 - RNA, 23 nt, synthetic construct
  source 1..23: mol_type = other RNA
tctcaccagttcaggcttcatca

SEQ ID NO: 2252 - RNA, 23 nt, synthetic construct
  source 1..23: mol_type = other RNA
ccagttcaggcttcatcatcatg

SEQ ID NO: 2253 - RNA, 23 nt, synthetic construct
  source 1..23: mol_type = other RNA
tcaggcttcatcatcatgtctct

SEQ ID NO: 2254 - RNA, 23 nt, synthetic construct
  source 1..23: mol_type = other RNA
cttcatcatcatgtctctgaaga

SEQ ID NO: 2255 - RNA, 23 nt, synthetic construct
  source 1..23: mol_type = other RNA
tcatcatgtctctgaagacagtg

SEQ ID NO: 2256 - RNA, 23 nt, synthetic construct
  source 1..23: mol_type = other RNA
tgtctctgaagacagtggcagtg

SEQ ID NO: 2257 - RNA, 23 nt, synthetic construct
  source 1..23: mol_type = other RNA
acagtggcagtgatcgccctgca

SEQ ID NO: 2258 - RNA, 23 nt, synthetic construct
  source 1..23: mol_type = other RNA
tgcaccggctccggatggtgttg

SEQ ID NO: 2259 - RNA, 23 nt, synthetic construct
  source 1..23: mol_type = other RNA
aaacagcctaatcgcacggcctc

SEQ ID NO: 2260 - RNA, 23 nt, synthetic construct
  source 1..23: mol_type = other RNA
gcctaatcgcacggcctcctttc

SEQ ID NO: 2261 - RNA, 23 nt, synthetic construct
  source 1..23: mol_type = other RNA
atcgcacggcctcctttccctgc

SEQ ID NO: 2262 - RNA, 23 nt, synthetic construct
  source 1..23: mol_type = other RNA
ggcctcctttccctgcaccgtac

SEQ ID NO: 2263 - RNA, 23 nt, synthetic construct
  source 1..23: mol_type = other RNA
cctttccctgcaccgtactcctc

SEQ ID NO: 2264 - RNA, 23 nt, synthetic construct
  source 1..23: mol_type = other RNA
cctgcaccgtactcctcaccctg

SEQ ID NO: 2265 - RNA, 23 nt, synthetic construct
  source 1..23: mol_type = other RNA
gtactcctcaccctgcttctctg

SEQ ID NO: 2266 - RNA, 23 nt, synthetic construct
  source 1..23: mol_type = other RNA
tcaccctgcttctctgggccacc

SEQ ID NO: 2267 - RNA, 23 nt, synthetic construct
  source 1..23: mol_type = other RNA
tgcttctctgggccaccagtttc

SEQ ID NO: 2268 - RNA, 23 nt, synthetic construct
  source 1..23: mol_type = other RNA
ctctgggccaccagtttcaccct

SEQ ID NO: 2269 - RNA, 23 nt, synthetic construct
  source 1..23: mol_type = other RNA
gccaccagtttcacccttgccac

SEQ ID NO: 2270 - RNA, 23 nt, synthetic construct
  source 1..23: mol_type = other RNA
tttcacccttgccaccttggcta

SEQ ID NO: 2271 - RNA, 23 nt, synthetic construct
  source 1..23: mol_type = other RNA
ttgccaccttggctaccttgaaa

SEQ ID NO: 2272 - RNA, 23 nt, synthetic construct
  source 1..23: mol_type = other RNA
accttggctaccttgaaaaccag

SEQ ID NO: 2273 - RNA, 23 nt, synthetic construct
  source 1..23: mol_type = other RNA
gctaccttgaaaaccagcaagtc

SEQ ID NO: 2274 - RNA, 23 nt, synthetic construct
  source 1..23: mol_type = other RNA
aaaaccagcaagtcccacctctg

SEQ ID NO: 2275 - RNA, 23 nt, synthetic construct
  source 1..23: mol_type = other RNA
gcaagtcccacctctgtcttccc

SEQ ID NO: 2276 - RNA, 23 nt, synthetic construct
  source 1..23: mol_type = other RNA
cccacctctgtcttcccatgtcc

SEQ ID NO: 2277 - RNA, 23 nt, synthetic construct
  source 1..23: mol_type = other RNA
ctctgtcttcccatgtccagtct

SEQ ID NO: 2278 - RNA, 23 nt, synthetic construct
  source 1..23: mol_type = other RNA
tcttcccatgtccagtctgattg

SEQ ID NO: 2279 - RNA, 23 nt, synthetic construct
  source 1..23: mol_type = other RNA
gtccagtctgattgctggaaaag

SEQ ID NO: 2280 - RNA, 23 nt, synthetic construct
  source 1..23: mol_type = other RNA
tctgattgctggaaaagggaaag

SEQ ID NO: 2281 - RNA, 23 nt, synthetic construct
  source 1..23: mol_type = other RNA
tgctggaaaagggaaagccattt

SEQ ID NO: 2282 - RNA, 23 nt, synthetic construct
  source 1..23: mol_type = other RNA
aaaagggaaagccattttgtctc

SEQ ID NO: 2283 - RNA, 23 nt, synthetic construct
  source 1..23: mol_type = other RNA
aaagccattttgtctctctatgt

SEQ ID NO: 2284 - RNA, 23 nt, synthetic construct
  source 1..23: mol_type = other RNA
cattttgtctctctatgtggtcg

SEQ ID NO: 2285 - RNA, 23 nt, synthetic construct
  source 1..23: mol_type = other RNA
tgtctctctatgtggtcgacttc

SEQ ID NO: 2286 - RNA, 23 nt, synthetic construct
  source 1..23: mol_type = other RNA
tatgtggtcgacttcaccttctg

SEQ ID NO: 2287 - RNA, 23 nt, synthetic construct
  source 1..23: mol_type = other RNA
gtcgacttcaccttctgtgttgc

SEQ ID NO: 2288 - RNA, 23 nt, synthetic construct
  source 1..23: mol_type = other RNA
tcaccttctgtgttgctgtggtc

SEQ ID NO: 2289 - RNA, 23 nt, synthetic construct
  source 1..23: mol_type = other RNA
tgtgttgctgtggtctctgtctc

SEQ ID NO: 2290 - RNA, 23 nt, synthetic construct
  source 1..23: mol_type = other RNA
gctgtggtctctgtctcttacat

SEQ ID NO: 2291 - RNA, 23 nt, synthetic construct
  source 1..23: mol_type = other RNA
ggtctctgtctcttacatcatga

SEQ ID NO: 2292 - RNA, 23 nt, synthetic construct
  source 1..23: mol_type = other RNA
tctcttacatcatgattgctcag

SEQ ID NO: 2293 - RNA, 23 nt, synthetic construct
  source 1..23: mol_type = other RNA
acatcatgattgctcagaccctg

SEQ ID NO: 2294 - RNA, 23 nt, synthetic construct
  source 1..23: mol_type = other RNA
tcagaccctgcggaagaacgctc

SEQ ID NO: 2295 - RNA, 23 nt, synthetic construct
  source 1..23: mol_type = other RNA
cctgcggaagaacgctcaagtca

SEQ ID NO: 2296 - RNA, 23 nt, synthetic construct
  source 1..23: mol_type = other RNA
ggaagaacgctcaagtcagaaag

SEQ ID NO: 2297 - RNA, 23 nt, synthetic construct
  source 1..23: mol_type = other RNA
aacgctcaagtcagaaagtgccc

SEQ ID NO: 2298 - RNA, 23 nt, synthetic construct
  source 1..23: mol_type = other RNA
ctgtaatcacagtcgatgcttcc

SEQ ID NO: 2299 - RNA, 23 nt, synthetic construct
  source 1..23: mol_type = other RNA
acagtcgatgcttccagaccaca

SEQ ID NO: 2300 - RNA, 23 nt, synthetic construct
  source 1..23: mol_type = other RNA
atgcttccagaccacagcctttc

SEQ ID NO: 2301 - RNA, 23 nt, synthetic construct
  source 1..23: mol_type = other RNA
tccagaccacagcctttcatggg

SEQ ID NO: 2302 - RNA, 23 nt, synthetic construct
  source 1..23: mol_type = other RNA
aggtggagatcccatccagtgtg

SEQ ID NO: 2303 - RNA, 23 nt, synthetic construct
  source 1..23: mol_type = other RNA
gagatcccatccagtgtgccatg

SEQ ID NO: 2304 - RNA, 23 nt, synthetic construct
  source 1..23: mol_type = other RNA
catgccggctctgtataggaacc

SEQ ID NO: 2305 - RNA, 23 nt, synthetic construct
  source 1..23: mol_type = other RNA
cggctctgtataggaaccagaat

SEQ ID NO: 2306 - RNA, 23 nt, synthetic construct
  source 1..23: mol_type = other RNA
ctgtataggaaccagaattacaa

SEQ ID NO: 2307 - RNA, 23 nt, synthetic construct
  source 1..23: mol_type = other RNA
aggaaccagaattacaacaaact

SEQ ID NO: 2308 - RNA, 23 nt, synthetic construct
  source 1..23: mol_type = other RNA
agaattacaacaaactgcagcac

SEQ ID NO: 2309 - RNA, 23 nt, synthetic construct
  source 1..23: mol_type = other RNA
acaacaaactgcagcacgttcag

SEQ ID NO: 2310 - RNA, 23 nt, synthetic construct
  source 1..23: mol_type = other RNA
aactgcagcacgttcagacccgt

SEQ ID NO: 2311 - RNA, 23 nt, synthetic construct
  source 1..23: mol_type = other RNA
agcacgttcagacccgtggatat

SEQ ID NO: 2312 - RNA, 23 nt, synthetic construct
  source 1..23: mol_type = other RNA
ttcagacccgtggatataccaag

SEQ ID NO: 2313 - RNA, 23 nt, synthetic construct
  source 1..23: mol_type = other RNA
acccgtggatataccaagagtcc

SEQ ID NO: 2314 - RNA, 23 nt, synthetic construct
  source 1..23: mol_type = other RNA
tggatataccaagagtcccaacc

SEQ ID NO: 2315 - RNA, 23 nt, synthetic construct
  source 1..23: mol_type = other RNA
ataccaagagtcccaaccaactg

SEQ ID NO: 2316 - RNA, 23 nt, synthetic construct
  source 1..23: mol_type = other RNA
agagtcccaaccaactggtcacc

SEQ ID NO: 2317 - RNA, 23 nt, synthetic construct
  source 1..23: mol_type = other RNA
cagcaagccgactccagctcgta

SEQ ID NO: 2318 - RNA, 23 nt, synthetic construct
  source 1..23: mol_type = other RNA
gccgactccagctcgtatcagcc

SEQ ID NO: 2319 - RNA, 23 nt, synthetic construct
  source 1..23: mol_type = other RNA
agctcgtatcagccatcaacctc

SEQ ID NO: 2320 - RNA, 23 nt, synthetic construct
  source 1..23: mol_type = other RNA
tcagccatcaacctctccactgc

SEQ ID NO: 2321 - RNA, 23 nt, synthetic construct
  source 1..23: mol_type = other RNA
catcaacctctccactgccaagg

SEQ ID NO: 2322 - RNA, 23 nt, synthetic construct
  source 1..23: mol_type = other RNA
acctctccactgccaaggattcc

SEQ ID NO: 2323 - RNA, 23 nt, synthetic construct
  source 1..23: mol_type = other RNA
actgccaaggattccaaagccgt

SEQ ID NO: 2324 - RNA, 23 nt, synthetic construct
  source 1..23: mol_type = other RNA
aggattccaaagccgtggtcacc

SEQ ID NO: 2325 - RNA, 23 nt, synthetic construct
  source 1..23: mol_type = other RNA
ccaaagccgtggtcacctgtgtg

SEQ ID NO: 2326 - RNA, 23 nt, synthetic construct
  source 1..23: mol_type = other RNA
cgtggtcacctgtgtgatcattg

SEQ ID NO: 2327 - RNA, 23 nt, synthetic construct
  source 1..23: mol_type = other RNA
tcacctgtgtgatcattgtgctg

SEQ ID NO: 2328 - RNA, 23 nt, synthetic construct
  source 1..23: mol_type = other RNA
gtgtgatcattgtgctgtcagtc

SEQ ID NO: 2329 - RNA, 23 nt, synthetic construct
  source 1..23: mol_type = other RNA
ttgtgctgtcagtcctggtgtgc

SEQ ID NO: 2330 - RNA, 23 nt, synthetic construct
  source 1..23: mol_type = other RNA
tgtcagtcctggtgtgctgtctt

SEQ ID NO: 2331 - RNA, 23 nt, synthetic construct
  source 1..23: mol_type = other RNA
tcctggtgtgctgtcttccactg

SEQ ID NO: 2332 - RNA, 23 nt, synthetic construct
  source 1..23: mol_type = other RNA
gatttccttggtacaggtggttc

SEQ ID NO: 2333 - RNA, 23 nt, synthetic construct
  source 1..23: mol_type = other RNA
ccttggtacaggtggttctctcc

SEQ ID NO: 2334 - RNA, 23 nt, synthetic construct
  source 1..23: mol_type = other RNA
aggtggttctctccagcaatggg

SEQ ID NO: 2335 - RNA, 23 nt, synthetic construct
  source 1..23: mol_type = other RNA
tctctccagcaatgggagcttca

SEQ ID NO: 2336 - RNA, 23 nt, synthetic construct
  source 1..23: mol_type = other RNA
gcaatgggagcttcattctttac

SEQ ID NO: 2337 - RNA, 23 nt, synthetic construct
  source 1..23: mol_type = other RNA
gcttcattctttaccagtttgaa

SEQ ID NO: 2338 - RNA, 23 nt, synthetic construct
  source 1..23: mol_type = other RNA
ttctttaccagtttgaattgttt

SEQ ID NO: 2339 - RNA, 23 nt, synthetic construct
  source 1..23: mol_type = other RNA
accagtttgaattgtttggattt

SEQ ID NO: 2340 - RNA, 23 nt, synthetic construct
  source 1..23: mol_type = other RNA
tgaattgtttggatttactctta

SEQ ID NO: 2341 - RNA, 23 nt, synthetic construct
  source 1..23: mol_type = other RNA
actcttatatttttcaagtcagg

SEQ ID NO: 2342 - RNA, 23 nt, synthetic construct
  source 1..23: mol_type = other RNA
tttttcaagtcaggattaaaccc

SEQ ID NO: 2343 - RNA, 23 nt, synthetic construct
  source 1..23: mol_type = other RNA
aagtcaggattaaacccttttat

SEQ ID NO: 2344 - RNA, 23 nt, synthetic construct
  source 1..23: mol_type = other RNA
taaacccttttatatattctcgg

SEQ ID NO: 2345 - RNA, 23 nt, synthetic construct
  source 1..23: mol_type = other RNA
ccttttatatattctcggaacag

SEQ ID NO: 2346 - RNA, 23 nt, synthetic construct
  source 1..23: mol_type = other RNA
tatatattctcggaacagtgcag

SEQ ID NO: 2347 - RNA, 23 nt, synthetic construct
  source 1..23: mol_type = other RNA
attctcggaacagtgcagggctg

SEQ ID NO: 2348 - RNA, 23 nt, synthetic construct
  source 1..23: mol_type = other RNA
gtgcagggctgagaaggaaagtg

SEQ ID NO: 2349 - RNA, 23 nt, synthetic construct
  source 1..23: mol_type = other RNA
gggctgagaaggaaagtgctctg

SEQ ID NO: 2350 - RNA, 23 nt, synthetic construct
  source 1..23: mol_type = other RNA
gagaaggaaagtgctctggtgcc

SEQ ID NO: 2351 - RNA, 23 nt, synthetic construct
  source 1..23: mol_type = other RNA
ctctggtgcctccaatacatagg

SEQ ID NO: 2352 - RNA, 23 nt, synthetic construct
  source 1..23: mol_type = other RNA
tgcctccaatacataggcctggg

SEQ ID NO: 2353 - RNA, 23 nt, synthetic construct
  source 1..23: mol_type = other RNA
ccaatacataggcctgggttttt

SEQ ID NO: 2354 - RNA, 23 nt, synthetic construct
  source 1..23: mol_type = other RNA
tttttctgctgcaaacaaaagac

SEQ ID NO: 2355 - RNA, 23 nt, synthetic construct
  source 1..23: mol_type = other RNA
gctgcaaacaaaagactcgactt

SEQ ID NO: 2356 - RNA, 23 nt, synthetic construct
  source 1..23: mol_type = other RNA
aaacaaaagactcgacttcgagc

SEQ ID NO: 2357 - RNA, 23 nt, synthetic construct
  source 1..23: mol_type = other RNA
aaagactcgacttcgagccatgg

SEQ ID NO: 2358 - RNA, 23 nt, synthetic construct
  source 1..23: mol_type = other RNA
tcgacttcgagccatgggaaaag

SEQ ID NO: 2359 - RNA, 23 nt, synthetic construct
  source 1..23: mol_type = other RNA
ttcgagccatgggaaaagggaac

SEQ ID NO: 2360 - RNA, 23 nt, synthetic construct
  source 1..23: mol_type = other RNA
gccatgggaaaagggaacctcga

SEQ ID NO: 2361 - RNA, 23 nt, synthetic construct
  source 1..23: mol_type = other RNA
gaaaagggaacctcgaagtcaac

SEQ ID NO: 2362 - RNA, 23 nt, synthetic construct
  source 1..23: mol_type = other RNA
ggaacctcgaagtcaacagaaac

SEQ ID NO: 2363 - RNA, 23 nt, synthetic construct
  source 1..23: mol_type = other RNA
tcgaagtcaacagaaacaaatcc

SEQ ID NO: 2364 - RNA, 23 nt, synthetic construct
  source 1..23: mol_type = other RNA
gtcaacagaaacaaatcctccca

SEQ ID NO: 2365 - RNA, 23 nt, synthetic construct
  source 1..23: mol_type = other RNA
agaaacaaatcctcccatcatga

SEQ ID NO: 2366 - RNA, 23 nt, synthetic construct
  source 1..23: mol_type = other RNA
aaatcctcccatcatgaaacaaa

SEQ ID NO: 2367 - RNA, 23 nt, synthetic construct
  source 1..23: mol_type = other RNA
ctcccatcatgaaacaaactctg

SEQ ID NO: 2368 - RNA, 23 nt, synthetic construct
  source 1..23: mol_type = other RNA
tcatgaaacaaactctgcctaca

SEQ ID NO: 2369 - RNA, 23 nt, synthetic construct
  source 1..23: mol_type = other RNA
aaactctgcctacatgttatctc

SEQ ID NO: 2370 - RNA, 23 nt, synthetic construct
  source 1..23: mol_type = other RNA
ctgcctacatgttatctccaaag

SEQ ID NO: 2371 - RNA, 23 nt, synthetic construct
  source 1..23: mol_type = other RNA
tacatgttatctccaaagccaca

SEQ ID NO: 2372 - RNA, 23 nt, synthetic construct
  source 1..23: mol_type = other RNA
tctccaaagccacagaagaaatt

SEQ ID NO: 2373 - RNA, 23 nt, synthetic construct
  source 1..23: mol_type = other RNA
aaagccacagaagaaatttgtgg

SEQ ID NO: 2374 - RNA, 23 nt, synthetic construct
  source 1..23: mol_type = other RNA
cacagaagaaatttgtggaccag

SEQ ID NO: 2375 - RNA, 23 nt, synthetic construct
  source 1..23: mol_type = other RNA
aagaaatttgtggaccaggcttg

SEQ ID NO: 2376 - RNA, 23 nt, synthetic construct
  source 1..23: mol_type = other RNA
ggaccaggcttgtggcccaagtc

SEQ ID NO: 2377 - RNA, 23 nt, synthetic construct
  source 1..23: mol_type = other RNA
cttgtggcccaagtcattcaaaa

SEQ ID NO: 2378 - RNA, 23 nt, synthetic construct
  source 1..23: mol_type = other RNA
ggcccaagtcattcaaaagaaag

SEQ ID NO: 2379 - RNA, 23 nt, synthetic construct
  source 1..23: mol_type = other RNA
gtcattcaaaagaaagtatggtg

SEQ ID NO: 2380 - RNA, 23 nt, synthetic construct
  source 1..23: mol_type = other RNA
tcaaaagaaagtatggtgagtcc

SEQ ID NO: 2381 - RNA, 23 nt, synthetic construct
  source 1..23: mol_type = other RNA
aaagtatggtgagtcccaagatc

SEQ ID NO: 2382 - RNA, 23 nt, synthetic construct
  source 1..23: mol_type = other RNA
ggtgagtcccaagatctctgctg

SEQ ID NO: 2383 - RNA, 23 nt, synthetic construct
  source 1..23: mol_type = other RNA
gtcccaagatctctgctggacat

SEQ ID NO: 2384 - RNA, 23 nt, synthetic construct
  source 1..23: mol_type = other RNA
aagatctctgctggacatcaaca

SEQ ID NO: 2385 - RNA, 23 nt, synthetic construct
  source 1..23: mol_type = other RNA
ctctgctggacatcaacactgtg

SEQ ID NO: 2386 - RNA, 23 nt, synthetic construct
  source 1..23: mol_type = other RNA
tggacatcaacactgtggtcaga

SEQ ID NO: 2387 - RNA, 23 nt, synthetic construct
  source 1..23: mol_type = other RNA
caacactgtggtcagagcagctc

SEQ ID NO: 2388 - RNA, 23 nt, synthetic construct
  source 1..23: mol_type = other RNA
atcaacactcggattgaacctta

SEQ ID NO: 2389 - RNA, 23 nt, synthetic construct
  source 1..23: mol_type = other RNA
cactcggattgaaccttactaca

SEQ ID NO: 2390 - RNA, 23 nt, synthetic construct
  source 1..23: mol_type = other RNA
gattgaaccttactacagcatct

SEQ ID NO: 2391 - RNA, 23 nt, synthetic construct
  source 1..23: mol_type = other RNA
aaccttactacagcatctataac

SEQ ID NO: 2392 - RNA, 23 nt, synthetic construct
  source 1..23: mol_type = other RNA
tactacagcatctataacagcag

SEQ ID NO: 2393 - RNA, 23 nt, synthetic construct
  source 1..23: mol_type = other RNA
agcatctataacagcagcccttc

SEQ ID NO: 2394 - RNA, 23 nt, synthetic construct
  source 1..23: mol_type = other RNA
aggagagcagcccatgtaactta

SEQ ID NO: 2395 - RNA, 23 nt, synthetic construct
  source 1..23: mol_type = other RNA
agcagcccatgtaacttacagcc

SEQ ID NO: 2396 - RNA, 23 nt, synthetic construct
  source 1..23: mol_type = other RNA
ccatgtaacttacagccagtaaa

SEQ ID NO: 2397 - RNA, 23 nt, synthetic construct
  source 1..23: mol_type = other RNA
aacttacagccagtaaactcttt

SEQ ID NO: 2398 - RNA, 23 nt, synthetic construct
  source 1..23: mol_type = other RNA
agccagtaaactcttttggattt

SEQ ID NO: 2399 - RNA, 23 nt, synthetic construct
  source 1..23: mol_type = other RNA
aaactcttttggatttgccaatt

SEQ ID NO: 2400 - RNA, 23 nt, synthetic construct
  source 1..23: mol_type = other RNA
tggatttgccaattcatatattg

SEQ ID NO: 2401 - RNA, 23 nt, synthetic construct
  source 1..23: mol_type = other RNA
caattcatatattgccatgcatt

SEQ ID NO: 2402 - RNA, 23 nt, synthetic construct
  source 1..23: mol_type = other RNA
atatattgccatgcattatcaca

SEQ ID NO: 2403 - RNA, 23 nt, synthetic construct
  source 1..23: mol_type = other RNA
ccatgcattatcacaccactaat

SEQ ID NO: 2404 - RNA, 23 nt, synthetic construct
  source 1..23: mol_type = other RNA
attatcacaccactaatgactta

SEQ ID NO: 2405 - RNA, 23 nt, synthetic construct
  source 1..23: mol_type = other RNA
cacaccactaatgacttagtgca

SEQ ID NO: 2406 - RNA, 23 nt, synthetic construct
  source 1..23: mol_type = other RNA
ctaatgacttagtgcaggaatat

SEQ ID NO: 2407 - RNA, 23 nt, synthetic construct
  source 1..23: mol_type = other RNA
acttagtgcaggaatatgacagc

SEQ ID NO: 2408 - RNA, 23 nt, synthetic construct
  source 1..23: mol_type = other RNA
gtgcaggaatatgacagcacttc

SEQ ID NO: 2409 - RNA, 23 nt, synthetic construct
  source 1..23: mol_type = other RNA
aatatgacagcacttcagccaag

SEQ ID NO: 2410 - RNA, 23 nt, synthetic construct
  source 1..23: mol_type = other RNA
agcacttcagccaagcagattcc

SEQ ID NO: 2411 - RNA, 23 nt, synthetic construct
  source 1..23: mol_type = other RNA
ttcagccaagcagattccagtcc

SEQ ID NO: 2412 - RNA, 23 nt, synthetic construct
  source 1..23: mol_type = other RNA
ccctccgtttaaagtcatggagg

SEQ ID NO: 2413 - RNA, 23 nt, synthetic construct
  source 1..23: mol_type = other RNA
ttaaagtcatggaggctatagga

SEQ ID NO: 2414 - RNA, 23 nt, synthetic construct
  source 1..23: mol_type = other RNA
atggaggctataggatcttatgt

SEQ ID NO: 2415 - RNA, 23 nt, synthetic construct
  source 1..23: mol_type = other RNA
ggctataggatcttatgtaaaca

SEQ ID NO: 2416 - RNA, 23 nt, synthetic construct
  source 1..23: mol_type = other RNA
taggatcttatgtaaacagtttt

SEQ ID NO: 2417 - RNA, 23 nt, synthetic construct
  source 1..23: mol_type = other RNA
gtaaacagtttttgtttctgata

SEQ ID NO: 2418 - RNA, 23 nt, synthetic construct
  source 1..23: mol_type = other RNA
cagtttttgtttctgatagtaat

SEQ ID NO: 2419 - RNA, 23 nt, synthetic construct
  source 1..23: mol_type = other RNA
tttgtttctgatagtaatggact

SEQ ID NO: 2420 - RNA, 23 nt, synthetic construct
  source 1..23: mol_type = other RNA
ttctgatagtaatggactttatt

SEQ ID NO: 2421 - RNA, 23 nt, synthetic construct
  source 1..23: mol_type = other RNA
gtaatggactttattctaacttg

SEQ ID NO: 2422 - RNA, 23 nt, synthetic construct
  source 1..23: mol_type = other RNA
actttattctaacttgagatcag

SEQ ID NO: 2423 - RNA, 23 nt, synthetic construct
  source 1..23: mol_type = other RNA
attctaacttgagatcagtggcg

SEQ ID NO: 2424 - RNA, 23 nt, synthetic construct
  source 1..23: mol_type = other RNA
ttgagatcagtggcggatcaaaa

SEQ ID NO: 2425 - RNA, 23 nt, synthetic construct
  source 1..23: mol_type = other RNA
atcagtggcggatcaaaacctac

SEQ ID NO: 2426 - RNA, 23 nt, synthetic construct
  source 1..23: mol_type = other RNA
gcggatcaaaacctacaagattc

SEQ ID NO: 2427 - RNA, 23 nt, synthetic construct
  source 1..23: mol_type = other RNA
tcaaaacctacaagattcaactg

SEQ ID NO: 2428 - RNA, 23 nt, synthetic construct
  source 1..23: mol_type = other RNA
acctacaagattcaactgaaaag

SEQ ID NO: 2429 - RNA, 23 nt, synthetic construct
  source 1..23: mol_type = other RNA
caagattcaactgaaaagttggc

SEQ ID NO: 2430 - RNA, 23 nt, synthetic construct
  source 1..23: mol_type = other RNA
tcaactgaaaagttggcagttat

SEQ ID NO: 2431 - RNA, 23 nt, synthetic construct
  source 1..23: mol_type = other RNA
gaaaagttggcagttatggtttt

SEQ ID NO: 2432 - RNA, 23 nt, synthetic construct
  source 1..23: mol_type = other RNA
gttggcagttatggttttctttc

SEQ ID NO: 2433 - RNA, 23 nt, synthetic construct
  source 1..23: mol_type = other RNA
cagttatggttttctttcatctg

SEQ ID NO: 2434 - RNA, 23 nt, synthetic construct
  source 1..23: mol_type = other RNA
ttttctttcatctgatgtgtcag

SEQ ID NO: 2435 - RNA, 23 nt, synthetic construct
  source 1..23: mol_type = other RNA
ttcatctgatgtgtcagtatctg

SEQ ID NO: 2436 - RNA, 23 nt, synthetic construct
  source 1..23: mol_type = other RNA
tgatgtgtcagtatctgttgatt

SEQ ID NO: 2437 - RNA, 23 nt, synthetic construct
  source 1..23: mol_type = other RNA
gtcagtatctgttgatttgcttt

SEQ ID NO: 2438 - RNA, 23 nt, synthetic construct
  source 1..23: mol_type = other RNA
ctgttgatttgctttgtagtttg

SEQ ID NO: 2439 - RNA, 23 nt, synthetic construct
  source 1..23: mol_type = other RNA
ttgctttgtagtttgttgacatc

SEQ ID NO: 2440 - RNA, 23 nt, synthetic construct
  source 1..23: mol_type = other RNA
ttgtagtttgttgacatcttaag

SEQ ID NO: 2441 - RNA, 23 nt, synthetic construct
  source 1..23: mol_type = other RNA
gtttgttgacatcttaagatttg

SEQ ID NO: 2442 - RNA, 23 nt, synthetic construct
  source 1..23: mol_type = other RNA
ttgacatcttaagatttgatgtg

SEQ ID NO: 2443 - RNA, 23 nt, synthetic construct
  source 1..23: mol_type = other RNA
tcttaagatttgatgtgaaagtt

SEQ ID NO: 2444 - RNA, 23 nt, synthetic construct
  source 1..23: mol_type = other RNA
gatttgatgtgaaagttttagat

SEQ ID NO: 2445 - RNA, 23 nt, synthetic construct
  source 1..23: mol_type = other RNA
cgatggcgatgatgcctctagtc

SEQ ID NO: 2446 - RNA, 23 nt, synthetic construct
  source 1..23: mol_type = other RNA
gatgatgcctctagtcctgcatc

SEQ ID NO: 2447 - RNA, 23 nt, synthetic construct
  source 1..23: mol_type = other RNA
tgcctctagtcctgcatcatcca

SEQ ID NO: 2448 - RNA, 23 nt, synthetic construct
  source 1..23: mol_type = other RNA
tagtcctgcatcatccagagcgg

SEQ ID NO: 2449 - RNA, 23 nt, synthetic construct
  source 1..23: mol_type = other RNA
gtccggactgcgagatggaggag

SEQ ID NO: 2450 - RNA, 23 nt, synthetic construct
  source 1..23: mol_type = other RNA
gccacccggcaggcttatctgtc

SEQ ID NO: 2451 - RNA, 23 nt, synthetic construct
  source 1..23: mol_type = other RNA
ccggcaggcttatctgtcttggg

SEQ ID NO: 2452 - RNA, 23 nt, synthetic construct
  source 1..23: mol_type = other RNA
ttatctgtcttgggcctcttttg

SEQ ID NO: 2453 - RNA, 23 nt, synthetic construct
  source 1..23: mol_type = other RNA
tgtcttgggcctcttttgtcaca

SEQ ID NO: 2454 - RNA, 23 nt, synthetic construct
  source 1..23: mol_type = other RNA
tgggcctcttttgtcacatattg

SEQ ID NO: 2455 - RNA, 23 nt, synthetic construct
  source 1..23: mol_type = other RNA
tcttttgtcacatattgctcatc

SEQ ID NO: 2456 - RNA, 23 nt, synthetic construct
  source 1..23: mol_type = other RNA
gtcacatattgctcatctgtgag

SEQ ID NO: 2457 - RNA, 23 nt, synthetic construct
  source 1..23: mol_type = other RNA
atattgctcatctgtgagctgag

SEQ ID NO: 2458 - RNA, 23 nt, synthetic construct
  source 1..23: mol_type = other RNA
ctcatctgtgagctgaggccctg

SEQ ID NO: 2459 - RNA, 23 nt, synthetic construct
  source 1..23: mol_type = other RNA
gaggccctgactcactgagtatt

SEQ ID NO: 2460 - RNA, 23 nt, synthetic construct
  source 1..23: mol_type = other RNA
cctgactcactgagtatttttgg

SEQ ID NO: 2461 - RNA, 23 nt, synthetic construct
  source 1..23: mol_type = other RNA
gggagcagaagaaggagacattt

SEQ ID NO: 2462 - RNA, 23 nt, synthetic construct
  source 1..23: mol_type = other RNA
cagaagaaggagacatttctctc

SEQ ID NO: 2463 - RNA, 23 nt, synthetic construct
  source 1..23: mol_type = other RNA
aaggagacatttctctccgaaaa

SEQ ID NO: 2464 - RNA, 23 nt, synthetic construct
  source 1..23: mol_type = other RNA
catttctctccgaaaatgaactc

SEQ ID NO: 2465 - RNA, 23 nt, synthetic construct
  source 1..23: mol_type = other RNA
ctctccgaaaatgaactcaacag

SEQ ID NO: 2466 - RNA, 23 nt, synthetic construct
  source 1..23: mol_type = other RNA
cgaaaatgaactcaacaggccac

SEQ ID NO: 2467 - RNA, 23 nt, synthetic construct
  source 1..23: mol_type = other RNA
atgaactcaacaggccaccttca

SEQ ID NO: 2468 - RNA, 23 nt, synthetic construct
  source 1..23: mol_type = other RNA
caacaggccaccttcaggatgcc

SEQ ID NO: 2469 - RNA, 23 nt, synthetic construct
  source 1..23: mol_type = other RNA
tgccacctcgctccatgtgcctc

SEQ ID NO: 2470 - RNA, 23 nt, synthetic construct
  source 1..23: mol_type = other RNA
cctcgctccatgtgcctcactca

SEQ ID NO: 2471 - RNA, 23 nt, synthetic construct
  source 1..23: mol_type = other RNA
ccatgtgcctcactcacaggaag

SEQ ID NO: 2472 - RNA, 23 nt, synthetic construct
  source 1..23: mol_type = other RNA
tgcctcactcacaggaaggaaac

SEQ ID NO: 2473 - RNA, 23 nt, synthetic construct
  source 1..23: mol_type = other RNA
tcacaggaaggaaacagcacctc

SEQ ID NO: 2474 - RNA, 23 nt, synthetic construct
  source 1..23: mol_type = other RNA
ggaaggaaacagcacctctctcc

SEQ ID NO: 2475 - RNA, 23 nt, synthetic construct
  source 1..23: mol_type = other RNA
ctctctccaggagggtcttcagg

SEQ ID NO: 2476 - RNA, 23 nt, synthetic construct
  source 1..23: mol_type = other RNA
tccaggagggtcttcaggatctc

SEQ ID NO: 2477 - RNA, 23 nt, synthetic construct
  source 1..23: mol_type = other RNA
agggtcttcaggatctcatccac

SEQ ID NO: 2478 - RNA, 23 nt, synthetic construct
  source 1..23: mol_type = other RNA
cttcaggatctcatccacacagc

SEQ ID NO: 2479 - RNA, 23 nt, synthetic construct
  source 1..23: mol_type = other RNA
tctcatccacacagccaccttgg

SEQ ID NO: 2480 - RNA, 23 nt, synthetic construct
  source 1..23: mol_type = other RNA
tccacacagccaccttggtgacc

SEQ ID NO: 2481 - RNA, 23 nt, synthetic construct
  source 1..23: mol_type = other RNA
acagccaccttggtgacctgtac

SEQ ID NO: 2482 - RNA, 23 nt, synthetic construct
  source 1..23: mol_type = other RNA
caccttggtgacctgtacttttc

SEQ ID NO: 2483 - RNA, 23 nt, synthetic construct
  source 1..23: mol_type = other RNA
tggtgacctgtacttttctactg

SEQ ID NO: 2484 - RNA, 23 nt, synthetic construct
  source 1..23: mol_type = other RNA
gtacttttctactggcggtcatc

SEQ ID NO: 2485 - RNA, 23 nt, synthetic construct
  source 1..23: mol_type = other RNA
tttctactggcggtcatcttctg

SEQ ID NO: 2486 - RNA, 23 nt, synthetic construct
  source 1..23: mol_type = other RNA
gcggtcatcttctgcctgggttc

SEQ ID NO: 2487 - RNA, 23 nt, synthetic construct
  source 1..23: mol_type = other RNA
tcttctgcctgggttcctatggc

SEQ ID NO: 2488 - RNA, 23 nt, synthetic construct
  source 1..23: mol_type = other RNA
tgcctgggttcctatggcaactt

SEQ ID NO: 2489 - RNA, 23 nt, synthetic construct
  source 1..23: mol_type = other RNA
gggttcctatggcaacttcattg

SEQ ID NO: 2490 - RNA, 23 nt, synthetic construct
  source 1..23: mol_type = other RNA
cctatggcaacttcattgtcttc

SEQ ID NO: 2491 - RNA, 23 nt, synthetic construct
  source 1..23: mol_type = other RNA
ggcaacttcattgtcttcttgtc

SEQ ID NO: 2492 - RNA, 23 nt, synthetic construct
  source 1..23: mol_type = other RNA
cttcattgtcttcttgtccttct

SEQ ID NO: 2493 - RNA, 23 nt, synthetic construct
  source 1..23: mol_type = other RNA
ttgtcttcttgtccttcttcgat

SEQ ID NO: 2494 - RNA, 23 nt, synthetic construct
  source 1..23: mol_type = other RNA
ttcttgtccttcttcgatccagc

SEQ ID NO: 2495 - RNA, 23 nt, synthetic construct
  source 1..23: mol_type = other RNA
gtccttcttcgatccagccttca

SEQ ID NO: 2496 - RNA, 23 nt, synthetic construct
  source 1..23: mol_type = other RNA
tcgatccagccttcaggaaattc

SEQ ID NO: 2497 - RNA, 23 nt, synthetic construct
  source 1..23: mol_type = other RNA
ccagccttcaggaaattcagaac

SEQ ID NO: 2498 - RNA, 23 nt, synthetic construct
  source 1..23: mol_type = other RNA
cttcaggaaattcagaaccaact

SEQ ID NO: 2499 - RNA, 23 nt, synthetic construct
  source 1..23: mol_type = other RNA
aaattcagaaccaactttgattt

SEQ ID NO: 2500 - RNA, 23 nt, synthetic construct
  source 1..23: mol_type = other RNA
agaaccaactttgatttcatgat

SEQ ID NO: 2501 - RNA, 23 nt, synthetic construct
  source 1..23: mol_type = other RNA
actttgatttcatgatcctgaac

SEQ ID NO: 2502 - RNA, 23 nt, synthetic construct
  source 1..23: mol_type = other RNA
atttcatgatcctgaacctgtcc

SEQ ID NO: 2503 - RNA, 23 nt, synthetic construct
  source 1..23: mol_type = other RNA
atgatcctgaacctgtccttctg

SEQ ID NO: 2504 - RNA, 23 nt, synthetic construct
  source 1..23: mol_type = other RNA
ctgaacctgtccttctgtgacct

SEQ ID NO: 2505 - RNA, 23 nt, synthetic construct
  source 1..23: mol_type = other RNA
cctgtccttctgtgacctcttca

SEQ ID NO: 2506 - RNA, 23 nt, synthetic construct
  source 1..23: mol_type = other RNA
ccttctgtgacctcttcatttgt

SEQ ID NO: 2507 - RNA, 23 nt, synthetic construct
  source 1..23: mol_type = other RNA
gtgacctcttcatttgtggagtg

SEQ ID NO: 2508 - RNA, 23 nt, synthetic construct
  source 1..23: mol_type = other RNA
ctcttcatttgtggagtgacagc

SEQ ID NO: 2509 - RNA, 23 nt, synthetic construct
  source 1..23: mol_type = other RNA
cccatgttcacctttgtgttatt

SEQ ID NO: 2510 - RNA, 23 nt, synthetic construct
  source 1..23: mol_type = other RNA
gttcacctttgtgttattcttca

SEQ ID NO: 2511 - RNA, 23 nt, synthetic construct
  source 1..23: mol_type = other RNA
cctttgtgttattcttcagctca

SEQ ID NO: 2512 - RNA, 23 nt, synthetic construct
  source 1..23: mol_type = other RNA
gtgttattcttcagctcagccag

SEQ ID NO: 2513 - RNA, 23 nt, synthetic construct
  source 1..23: mol_type = other RNA
ttcagctcagccagtagtatccc

SEQ ID NO: 2514 - RNA, 23 nt, synthetic construct
  source 1..23: mol_type = other RNA
ctcagccagtagtatcccggatg

SEQ ID NO: 2515 - RNA, 23 nt, synthetic construct
  source 1..23: mol_type = other RNA
agtagtatcccggatgctttctg

SEQ ID NO: 2516 - RNA, 23 nt, synthetic construct
  source 1..23: mol_type = other RNA
tatcccggatgctttctgcttca

SEQ ID NO: 2517 - RNA, 23 nt, synthetic construct
  source 1..23: mol_type = other RNA
cggatgctttctgcttcactttc

SEQ ID NO: 2518 - RNA, 23 nt, synthetic construct
  source 1..23: mol_type = other RNA
gctttctgcttcactttccatct

SEQ ID NO: 2519 - RNA, 23 nt, synthetic construct
  source 1..23: mol_type = other RNA
ttcactttccatctcaccagttc

SEQ ID NO: 2520 - RNA, 23 nt, synthetic construct
  source 1..23: mol_type = other RNA
ttccatctcaccagttcaggctt

SEQ ID NO: 2521 - RNA, 23 nt, synthetic construct
  source 1..23: mol_type = other RNA
tctcaccagttcaggcttcatca

SEQ ID NO: 2522 - RNA, 23 nt, synthetic construct
  source 1..23: mol_type = other RNA
ccagttcaggcttcatcatcatg

SEQ ID NO: 2523 - RNA, 23 nt, synthetic construct
  source 1..23: mol_type = other RNA
tcaggcttcatcatcatgtctct

SEQ ID NO: 2524 - RNA, 23 nt, synthetic construct
  source 1..23: mol_type = other RNA
cttcatcatcatgtctctgaaga

SEQ ID NO: 2525 - RNA, 23 nt, synthetic construct
  source 1..23: mol_type = other RNA
tcatcatgtctctgaagacagtg

SEQ ID NO: 2526 - RNA, 23 nt, synthetic construct
  source 1..23: mol_type = other RNA
tgtctctgaagacagtggcagtg

SEQ ID NO: 2527 - RNA, 23 nt, synthetic construct
  source 1..23: mol_type = other RNA
acagtggcagtgatcgccctgca

SEQ ID NO: 2528 - RNA, 23 nt, synthetic construct
  source 1..23: mol_type = other RNA
tgcaccggctccggatggtgttg

SEQ ID NO: 2529 - RNA, 23 nt, synthetic construct
  source 1..23: mol_type = other RNA
aaacagcctaatcgcacggcctc

SEQ ID NO: 2530 - RNA, 23 nt, synthetic construct
  source 1..23: mol_type = other RNA
gcctaatcgcacggcctcctttc

SEQ ID NO: 2531 - RNA, 23 nt, synthetic construct
  source 1..23: mol_type = other RNA
atcgcacggcctcctttccctgc

SEQ ID NO: 2532 - RNA, 23 nt, synthetic construct
  source 1..23: mol_type = other RNA
ggcctcctttccctgcaccgtac

SEQ ID NO: 2533 - RNA, 23 nt, synthetic construct
  source 1..23: mol_type = other RNA
cctttccctgcaccgtactcctc

SEQ ID NO: 2534 - RNA, 23 nt, synthetic construct
  source 1..23: mol_type = other RNA
cctgcaccgtactcctcaccctg

SEQ ID NO: 2535 - RNA, 23 nt, synthetic construct
  source 1..23: mol_type = other RNA
gtactcctcaccctgcttctctg

SEQ ID NO: 2536 - RNA, 23 nt, synthetic construct
  source 1..23: mol_type = other RNA
tcaccctgcttctctgggccacc

SEQ ID NO: 2537 - RNA, 23 nt, synthetic construct
  source 1..23: mol_type = other RNA
tgcttctctgggccaccagtttc

SEQ ID NO: 2538 - RNA, 23 nt, synthetic construct
  source 1..23: mol_type = other RNA
ctctgggccaccagtttcaccct

SEQ ID NO: 2539 - RNA, 23 nt, synthetic construct
  source 1..23: mol_type = other RNA
gccaccagtttcacccttgccac

SEQ ID NO: 2540 - RNA, 23 nt, synthetic construct
  source 1..23: mol_type = other RNA
tttcacccttgccaccttggcta

SEQ ID NO: 2541 - RNA, 23 nt, synthetic construct
  source 1..23: mol_type = other RNA
ttgccaccttggctaccttgaaa

SEQ ID NO: 2542 - RNA, 23 nt, synthetic construct
  source 1..23: mol_type = other RNA
accttggctaccttgaaaaccag

SEQ ID NO: 2543 - RNA, 23 nt, synthetic construct
  source 1..23: mol_type = other RNA
gctaccttgaaaaccagcaagtc

SEQ ID NO: 2544 - RNA, 23 nt, synthetic construct
  source 1..23: mol_type = other RNA
aaaaccagcaagtcccacctctg

SEQ ID NO: 2545 - RNA, 23 nt, synthetic construct
  source 1..23: mol_type = other RNA
gcaagtcccacctctgtcttccc

SEQ ID NO: 2546 - RNA, 23 nt, synthetic construct
  source 1..23: mol_type = other RNA
cccacctctgtcttcccatgtcc

SEQ ID NO: 2547 - RNA, 23 nt, synthetic construct
  source 1..23: mol_type = other RNA
ctctgtcttcccatgtccagtct

SEQ ID NO: 2548 - RNA, 23 nt, synthetic construct
  source 1..23: mol_type = other RNA
tcttcccatgtccagtctgattg

SEQ ID NO: 2549 - RNA, 23 nt, synthetic construct
  source 1..23: mol_type = other RNA
gtccagtctgattgctggaaaag

SEQ ID NO: 2550 - RNA, 23 nt, synthetic construct
  source 1..23: mol_type = other RNA
tctgattgctggaaaagggaaag

SEQ ID NO: 2551 - RNA, 23 nt, synthetic construct
  source 1..23: mol_type = other RNA
tgctggaaaagggaaagccattt

SEQ ID NO: 2552 - RNA, 23 nt, synthetic construct
  source 1..23: mol_type = other RNA
aaaagggaaagccattttgtctc

SEQ ID NO: 2553 - RNA, 23 nt, synthetic construct
  source 1..23: mol_type = other RNA
aaagccattttgtctctctatgt

SEQ ID NO: 2554 - RNA, 23 nt, synthetic construct
  source 1..23: mol_type = other RNA
cattttgtctctctatgtggtcg

SEQ ID NO: 2555 - RNA, 23 nt, synthetic construct
  source 1..23: mol_type = other RNA
tgtctctctatgtggtcgacttc

SEQ ID NO: 2556 - RNA, 23 nt, synthetic construct
  source 1..23: mol_type = other RNA
tatgtggtcgacttcaccttctg

SEQ ID NO: 2557 - RNA, 23 nt, synthetic construct
  source 1..23: mol_type = other RNA
gtcgacttcaccttctgtgttgc

SEQ ID NO: 2558 - RNA, 23 nt, synthetic construct
  source 1..23: mol_type = other RNA
tcaccttctgtgttgctgtggtc

SEQ ID NO: 2559 - RNA, 23 nt, synthetic construct
  source 1..23: mol_type = other RNA
tgtgttgctgtggtctctgtctc

SEQ ID NO: 2560 - RNA, 23 nt, synthetic construct
  source 1..23: mol_type = other RNA
gctgtggtctctgtctcttacat

SEQ ID NO: 2561 - RNA, 23 nt, synthetic construct
  source 1..23: mol_type = other RNA
ggtctctgtctcttacatcatga

SEQ ID NO: 2562 - RNA, 23 nt, synthetic construct
  source 1..23: mol_type = other RNA
tctcttacatcatgattgctcag

SEQ ID NO: 2563 - RNA, 23 nt, synthetic construct
  source 1..23: mol_type = other RNA
acatcatgattgctcagaccctg

SEQ ID NO: 2564 - RNA, 23 nt, synthetic construct
  source 1..23: mol_type = other RNA
tcagaccctgcggaagaacgctc

SEQ ID NO: 2565 - RNA, 23 nt, synthetic construct
  source 1..23: mol_type = other RNA
cctgcggaagaacgctcaagtca

SEQ ID NO: 2566 - RNA, 23 nt, synthetic construct
  source 1..23: mol_type = other RNA
ggaagaacgctcaagtcagaaag

SEQ ID NO: 2567 - RNA, 23 nt, synthetic construct
  source 1..23: mol_type = other RNA
aacgctcaagtcagaaagtgccc

SEQ ID NO: 2568 - RNA, 23 nt, synthetic construct
  source 1..23: mol_type = other RNA
ctgtaatcacagtcgatgcttcc

SEQ ID NO: 2569 - RNA, 23 nt, synthetic construct
  source 1..23: mol_type = other RNA
acagtcgatgcttccagaccaca

SEQ ID NO: 2570 - RNA, 23 nt, synthetic construct
  source 1..23: mol_type = other RNA
atgcttccagaccacagcctttc

SEQ ID NO: 2571 - RNA, 23 nt, synthetic construct
  source 1..23: mol_type = other RNA
tccagaccacagcctttcatggg

SEQ ID NO: 2572 - RNA, 23 nt, synthetic construct
  source 1..23: mol_type = other RNA
aggtggagatcccatccagtgtg

SEQ ID NO: 2573 - RNA, 23 nt, synthetic construct
  source 1..23: mol_type = other RNA
gagatcccatccagtgtgccatg

SEQ ID NO: 2574 - RNA, 23 nt, synthetic construct
  source 1..23: mol_type = other RNA
catgccggctctgtataggaacc

SEQ ID NO: 2575 - RNA, 23 nt, synthetic construct
  source 1..23: mol_type = other RNA
cggctctgtataggaaccagaat

SEQ ID NO: 2576 - RNA, 23 nt, synthetic construct
  source 1..23: mol_type = other RNA
ctgtataggaaccagaattacaa

SEQ ID NO: 2577 - RNA, 23 nt, synthetic construct
  source 1..23: mol_type = other RNA
aggaaccagaattacaacaaact

SEQ ID NO: 2578 - RNA, 23 nt, synthetic construct
  source 1..23: mol_type = other RNA
agaattacaacaaactgcagcac

SEQ ID NO: 2579 - RNA, 23 nt, synthetic construct
  source 1..23: mol_type = other RNA
acaacaaactgcagcacgttcag

SEQ ID NO: 2580 - RNA, 23 nt, synthetic construct
  source 1..23: mol_type = other RNA
aactgcagcacgttcagacccgt

SEQ ID NO: 2581 - RNA, 23 nt, synthetic construct
  source 1..23: mol_type = other RNA
agcacgttcagacccgtggatat

SEQ ID NO: 2582 - RNA, 23 nt, synthetic construct
  source 1..23: mol_type = other RNA
ttcagacccgtggatataccaag

SEQ ID NO: 2583 - RNA, 23 nt, synthetic construct
  source 1..23: mol_type = other RNA
acccgtggatataccaagagtcc

SEQ ID NO: 2584 - RNA, 23 nt, synthetic construct
  source 1..23: mol_type = other RNA
tggatataccaagagtcccaacc

SEQ ID NO: 2585 - RNA, 23 nt, synthetic construct
  source 1..23: mol_type = other RNA
ataccaagagtcccaaccaactg

SEQ ID NO: 2586 - RNA, 23 nt, synthetic construct
  source 1..23: mol_type = other RNA
agagtcccaaccaactggtcacc

SEQ ID NO: 2587 - RNA, 23 nt, synthetic construct
  source 1..23: mol_type = other RNA
cagcaagccgactccagctcgta

SEQ ID NO: 2588 - RNA, 23 nt, synthetic construct
  source 1..23: mol_type = other RNA
gccgactccagctcgtatcagcc

SEQ ID NO: 2589 - RNA, 23 nt, synthetic construct
  source 1..23: mol_type = other RNA
agctcgtatcagccatcaacctc

SEQ ID NO: 2590 - RNA, 23 nt, synthetic construct
  source 1..23: mol_type = other RNA
tcagccatcaacctctccactgc

SEQ ID NO: 2591 - RNA, 23 nt, synthetic construct
  source 1..23: mol_type = other RNA
catcaacctctccactgccaagg

SEQ ID NO: 2592 - RNA, 23 nt, synthetic construct
  source 1..23: mol_type = other RNA
acctctccactgccaaggattcc

SEQ ID NO: 2593 - RNA, 23 nt, synthetic construct
  source 1..23: mol_type = other RNA
actgccaaggattccaaagccgt

SEQ ID NO: 2594 - RNA, 23 nt, synthetic construct
  source 1..23: mol_type = other RNA
aggattccaaagccgtggtcacc

SEQ ID NO: 2595 - RNA, 23 nt, synthetic construct
  source 1..23: mol_type = other RNA
ccaaagccgtggtcacctgtgtg

SEQ ID NO: 2596 - RNA, 23 nt, synthetic construct
  source 1..23: mol_type = other RNA
cgtggtcacctgtgtgatcattg

SEQ ID NO: 2597 - RNA, 23 nt, synthetic construct
  source 1..23: mol_type = other RNA
tcacctgtgtgatcattgtgctg

SEQ ID NO: 2598 - RNA, 23 nt, synthetic construct
  source 1..23: mol_type = other RNA
gtgtgatcattgtgctgtcagtc

SEQ ID NO: 2599 - RNA, 23 nt, synthetic construct
  source 1..23: mol_type = other RNA
ttgtgctgtcagtcctggtgtgc

SEQ ID NO: 2600 - RNA, 23 nt, synthetic construct
  source 1..23: mol_type = other RNA
tgtcagtcctggtgtgctgtctt

SEQ ID NO: 2601 - RNA, 23 nt, synthetic construct
  source 1..23: mol_type = other RNA
tcctggtgtgctgtcttccactg

SEQ ID NO: 2602 - RNA, 23 nt, synthetic construct
  source 1..23: mol_type = other RNA
gatttccttggtacaggtggttc

SEQ ID NO: 2603 - RNA, 23 nt, synthetic construct
  source 1..23: mol_type = other RNA
ccttggtacaggtggttctctcc

SEQ ID NO: 2604 - RNA, 23 nt, synthetic construct
  source 1..23: mol_type = other RNA
aggtggttctctccagcaatggg

SEQ ID NO: 2605 - RNA, 23 nt, synthetic construct
  source 1..23: mol_type = other RNA
tctctccagcaatgggagcttca

SEQ ID NO: 2606 - RNA, 23 nt, synthetic construct
  source 1..23: mol_type = other RNA
gcaatgggagcttcattctttac

SEQ ID NO: 2607 - RNA, 23 nt, synthetic construct
  source 1..23: mol_type = other RNA
gcttcattctttaccagtttgaa

SEQ ID NO: 2608 - RNA, 23 nt, synthetic construct
  source 1..23: mol_type = other RNA
ttctttaccagtttgaattgttt

SEQ ID NO: 2609 - RNA, 23 nt, synthetic construct
  source 1..23: mol_type = other RNA
accagtttgaattgtttggattt

SEQ ID NO: 2610 - RNA, 23 nt, synthetic construct
  source 1..23: mol_type = other RNA
tgaattgtttggatttactctta

SEQ ID NO: 2611 - RNA, 23 nt, synthetic construct
  source 1..23: mol_type = other RNA
actcttatatttttcaagtcagg

SEQ ID NO: 2612 - RNA, 23 nt, synthetic construct
  source 1..23: mol_type = other RNA
tttttcaagtcaggattaaaccc

SEQ ID NO: 2613 - RNA, 23 nt, synthetic construct
  source 1..23: mol_type = other RNA
aagtcaggattaaacccttttat

SEQ ID NO: 2614 - RNA, 23 nt, synthetic construct
  source 1..23: mol_type = other RNA
taaacccttttatatattctcgg

SEQ ID NO: 2615 - RNA, 23 nt, synthetic construct
  source 1..23: mol_type = other RNA
ccttttatatattctcggaacag

SEQ ID NO: 2616 - RNA, 23 nt, synthetic construct
  source 1..23: mol_type = other RNA
tatatattctcggaacagtgcag

SEQ ID NO: 2617 - RNA, 23 nt, synthetic construct
  source 1..23: mol_type = other RNA
attctcggaacagtgcagggctg

SEQ ID NO: 2618 - RNA, 23 nt, synthetic construct
  source 1..23: mol_type = other RNA
gtgcagggctgagaaggaaagtg

SEQ ID NO: 2619 - RNA, 23 nt, synthetic construct
  source 1..23: mol_type = other RNA
gggctgagaaggaaagtgctctg

SEQ ID NO: 2620 - RNA, 23 nt, synthetic construct
  source 1..23: mol_type = other RNA
gagaaggaaagtgctctggtgcc

SEQ ID NO: 2621 - RNA, 23 nt, synthetic construct
  source 1..23: mol_type = other RNA
ctctggtgcctccaatacatagg

SEQ ID NO: 2622 - RNA, 23 nt, synthetic construct
  source 1..23: mol_type = other RNA
tgcctccaatacataggcctggg

SEQ ID NO: 2623 - RNA, 23 nt, synthetic construct
  source 1..23: mol_type = other RNA
ccaatacataggcctgggttttt

SEQ ID NO: 2624 - RNA, 23 nt, synthetic construct
  source 1..23: mol_type = other RNA
tttttctgctgcaaacaaaagac

SEQ ID NO: 2625 - RNA, 23 nt, synthetic construct
  source 1..23: mol_type = other RNA
gctgcaaacaaaagactcgactt

SEQ ID NO: 2626 - RNA, 23 nt, synthetic construct
  source 1..23: mol_type = other RNA
aaacaaaagactcgacttcgagc

SEQ ID NO: 2627 - RNA, 23 nt, synthetic construct
  source 1..23: mol_type = other RNA
aaagactcgacttcgagccatgg

SEQ ID NO: 2628 - RNA, 23 nt, synthetic construct
  source 1..23: mol_type = other RNA
tcgacttcgagccatgggaaaag

SEQ ID NO: 2629 - RNA, 23 nt, synthetic construct
  source 1..23: mol_type = other RNA
ttcgagccatgggaaaagggaac

SEQ ID NO: 2630 - RNA, 23 nt, synthetic construct
  source 1..23: mol_type = other RNA
gccatgggaaaagggaacctcga

SEQ ID NO: 2631 - RNA, 23 nt, synthetic construct
  source 1..23: mol_type = other RNA
gaaaagggaacctcgaagtcaac

SEQ ID NO: 2632 - RNA, 23 nt, synthetic construct
  source 1..23: mol_type = other RNA
ggaacctcgaagtcaacagaaac

SEQ ID NO: 2633 - RNA, 23 nt, synthetic construct
  source 1..23: mol_type = other RNA
tcgaagtcaacagaaacaaatcc

SEQ ID NO: 2634 - RNA, 23 nt, synthetic construct
  source 1..23: mol_type = other RNA
gtcaacagaaacaaatcctccca

SEQ ID NO: 2635 - RNA, 23 nt, synthetic construct
  source 1..23: mol_type = other RNA
agaaacaaatcctcccatcatga

SEQ ID NO: 2636 - RNA, 23 nt, synthetic construct
  source 1..23: mol_type = other RNA
aaatcctcccatcatgaaacaaa

SEQ ID NO: 2637 - RNA, 23 nt, synthetic construct
  source 1..23: mol_type = other RNA
ctcccatcatgaaacaaactctg

SEQ ID NO: 2638 - RNA, 23 nt, synthetic construct
  source 1..23: mol_type = other RNA
tcatgaaacaaactctgcctaca

SEQ ID NO: 2639 - RNA, 23 nt, synthetic construct
  source 1..23: mol_type = other RNA
aaactctgcctacatgttatctc

SEQ ID NO: 2640 - RNA, 23 nt, synthetic construct
  source 1..23: mol_type = other RNA
ctgcctacatgttatctccaaag

SEQ ID NO: 2641 - RNA, 23 nt, synthetic construct
  source 1..23: mol_type = other RNA
tacatgttatctccaaagccaca

SEQ ID NO: 2642 - RNA, 23 nt, synthetic construct
  source 1..23: mol_type = other RNA
tctccaaagccacagaagaaatt

SEQ ID NO: 2643 - RNA, 23 nt, synthetic construct
  source 1..23: mol_type = other RNA
aaagccacagaagaaatttgtgg

SEQ ID NO: 2644 - RNA, 23 nt, synthetic construct
  source 1..23: mol_type = other RNA
cacagaagaaatttgtggaccag

SEQ ID NO: 2645 - RNA, 23 nt, synthetic construct
  source 1..23: mol_type = other RNA
aagaaatttgtggaccaggcttg

SEQ ID NO: 2646 - RNA, 23 nt, synthetic construct
  source 1..23: mol_type = other RNA
ggaccaggcttgtggcccaagtc

SEQ ID NO: 2647 - RNA, 23 nt, synthetic construct
  source 1..23: mol_type = other RNA
cttgtggcccaagtcattcaaaa

SEQ ID NO: 2648 - RNA, 23 nt, synthetic construct
  source 1..23: mol_type = other RNA
ggcccaagtcattcaaaagaaag

SEQ ID NO: 2649 - RNA, 23 nt, synthetic construct
  source 1..23: mol_type = other RNA
gtcattcaaaagaaagtatggtg

SEQ ID NO: 2650 - RNA, 23 nt, synthetic construct
  source 1..23: mol_type = other RNA
tcaaaagaaagtatggtgagtcc

SEQ ID NO: 2651 - RNA, 23 nt, synthetic construct
  source 1..23: mol_type = other RNA
aaagtatggtgagtcccaagatc

SEQ ID NO: 2652 - RNA, 23 nt, synthetic construct
  source 1..23: mol_type = other RNA
ggtgagtcccaagatctctgctg

SEQ ID NO: 2653 - RNA, 23 nt, synthetic construct
  source 1..23: mol_type = other RNA
gtcccaagatctctgctggacat

SEQ ID NO: 2654 - RNA, 23 nt, synthetic construct
  source 1..23: mol_type = other RNA
aagatctctgctggacatcaaca

SEQ ID NO: 2655 - RNA, 23 nt, synthetic construct
  source 1..23: mol_type = other RNA
ctctgctggacatcaacactgtg

SEQ ID NO: 2656 - RNA, 23 nt, synthetic construct
  source 1..23: mol_type = other RNA
tggacatcaacactgtggtcaga

SEQ ID NO: 2657 - RNA, 23 nt, synthetic construct
  source 1..23: mol_type = other RNA
caacactgtggtcagagcagctc

SEQ ID NO: 2658 - RNA, 23 nt, synthetic construct
  source 1..23: mol_type = other RNA
atcaacactcggattgaacctta

SEQ ID NO: 2659 - RNA, 23 nt, synthetic construct
  source 1..23: mol_type = other RNA
cactcggattgaaccttactaca

SEQ ID NO: 2660 - RNA, 23 nt, synthetic construct
  source 1..23: mol_type = other RNA
gattgaaccttactacagcatct

SEQ ID NO: 2661 - RNA, 23 nt, synthetic construct
  source 1..23: mol_type = other RNA
aaccttactacagcatctataac

SEQ ID NO: 2662 - RNA, 23 nt, synthetic construct
  source 1..23: mol_type = other RNA
tactacagcatctataacagcag

SEQ ID NO: 2663 - RNA, 23 nt, synthetic construct
  source 1..23: mol_type = other RNA
agcatctataacagcagcccttc

SEQ ID NO: 2664 - RNA, 23 nt, synthetic construct
  source 1..23: mol_type = other RNA
aggagagcagcccatgtaactta

SEQ ID NO: 2665 - RNA, 23 nt, synthetic construct
  source 1..23: mol_type = other RNA
agcagcccatgtaacttacagcc

SEQ ID NO: 2666 - RNA, 23 nt, synthetic construct
  source 1..23: mol_type = other RNA
ccatgtaacttacagccagtaaa

SEQ ID NO: 2667 - RNA, 23 nt, synthetic construct
  source 1..23: mol_type = other RNA
aacttacagccagtaaactcttt

SEQ ID NO: 2668 - RNA, 23 nt, synthetic construct
  source 1..23: mol_type = other RNA
agccagtaaactcttttggattt

SEQ ID NO: 2669 - RNA, 23 nt, synthetic construct
  source 1..23: mol_type = other RNA
aaactcttttggatttgccaatt

SEQ ID NO: 2670 - RNA, 23 nt, synthetic construct
  source 1..23: mol_type = other RNA
tggatttgccaattcatatattg

SEQ ID NO: 2671 - RNA, 23 nt, synthetic construct
  source 1..23: mol_type = other RNA
caattcatatattgccatgcatt

SEQ ID NO: 2672 - RNA, 23 nt, synthetic construct
  source 1..23: mol_type = other RNA
atatattgccatgcattatcaca

SEQ ID NO: 2673 - RNA, 23 nt, synthetic construct
  source 1..23: mol_type = other RNA
ccatgcattatcacaccactaat

SEQ ID NO: 2674 - RNA, 23 nt, synthetic construct
  source 1..23: mol_type = other RNA
attatcacaccactaatgactta

SEQ ID NO: 2675 - RNA, 23 nt, synthetic construct
  source 1..23: mol_type = other RNA
cacaccactaatgacttagtgca

SEQ ID NO: 2676 - RNA, 23 nt, synthetic construct
  source 1..23: mol_type = other RNA
ctaatgacttagtgcaggaatat

SEQ ID NO: 2677 - RNA, 23 nt, synthetic construct
  source 1..23: mol_type = other RNA
acttagtgcaggaatatgacagc

SEQ ID NO: 2678 - RNA, 23 nt, synthetic construct
  source 1..23: mol_type = other RNA
gtgcaggaatatgacagcacttc

SEQ ID NO: 2679 - RNA, 23 nt, synthetic construct
  source 1..23: mol_type = other RNA
aatatgacagcacttcagccaag

SEQ ID NO: 2680 - RNA, 23 nt, synthetic construct
  source 1..23: mol_type = other RNA
agcacttcagccaagcagattcc

SEQ ID NO: 2681 - RNA, 23 nt, synthetic construct
  source 1..23: mol_type = other RNA
ttcagccaagcagattccagtcc

SEQ ID NO: 2682 - RNA, 23 nt, synthetic construct
  source 1..23: mol_type = other RNA
ccctccgtttaaagtcatggagg

SEQ ID NO: 2683 - RNA, 23 nt, synthetic construct
  source 1..23: mol_type = other RNA
ttaaagtcatggaggctatagga

SEQ ID NO: 2684 - RNA, 23 nt, synthetic construct
  source 1..23: mol_type = other RNA
atggaggctataggatcttatgt

SEQ ID NO: 2685 - RNA, 23 nt, synthetic construct
  source 1..23: mol_type = other RNA
ggctataggatcttatgtaaaca

SEQ ID NO: 2686 - RNA, 23 nt, synthetic construct
  source 1..23: mol_type = other RNA
taggatcttatgtaaacagtttt

SEQ ID NO: 2687 - RNA, 23 nt, synthetic construct
  source 1..23: mol_type = other RNA
gtaaacagtttttgtttctgata

SEQ ID NO: 2688 - RNA, 23 nt, synthetic construct
  source 1..23: mol_type = other RNA
cagtttttgtttctgatagtaat

SEQ ID NO: 2689 - RNA, 23 nt, synthetic construct
  source 1..23: mol_type = other RNA
tttgtttctgatagtaatggact

SEQ ID NO: 2690 - RNA, 23 nt, synthetic construct
  source 1..23: mol_type = other RNA
ttctgatagtaatggactttatt

SEQ ID NO: 2691 - RNA, 23 nt, synthetic construct
  source 1..23: mol_type = other RNA
gtaatggactttattctaacttg

SEQ ID NO: 2692 - RNA, 23 nt, synthetic construct
  source 1..23: mol_type = other RNA
actttattctaacttgagatcag

SEQ ID NO: 2693 - RNA, 23 nt, synthetic construct
  source 1..23: mol_type = other RNA
attctaacttgagatcagtggcg

SEQ ID NO: 2694 - RNA, 23 nt, synthetic construct
  source 1..23: mol_type = other RNA
ttgagatcagtggcggatcaaaa

SEQ ID NO: 2695 - RNA, 23 nt, synthetic construct
  source 1..23: mol_type = other RNA
atcagtggcggatcaaaacctac

SEQ ID NO: 2696 - RNA, 23 nt, synthetic construct
  source 1..23: mol_type = other RNA
gcggatcaaaacctacaagattc

SEQ ID NO: 2697 - RNA, 23 nt, synthetic construct
  source 1..23: mol_type = other RNA
tcaaaacctacaagattcaactg

SEQ ID NO: 2698 - RNA, 23 nt, synthetic construct
  source 1..23: mol_type = other RNA
acctacaagattcaactgaaaag

SEQ ID NO: 2699 - RNA, 23 nt, synthetic construct
  source 1..23: mol_type = other RNA
caagattcaactgaaaagttggc

SEQ ID NO: 2700 - RNA, 23 nt, synthetic construct
  source 1..23: mol_type = other RNA
tcaactgaaaagttggcagttat

SEQ ID NO: 2701 - RNA, 23 nt, synthetic construct
  source 1..23: mol_type = other RNA
gaaaagttggcagttatggtttt

SEQ ID NO: 2702 - RNA, 23 nt, synthetic construct
  source 1..23: mol_type = other RNA
gttggcagttatggttttctttc

SEQ ID NO: 2703 - RNA, 23 nt, synthetic construct
  source 1..23: mol_type = other RNA
cagttatggttttctttcatctg

SEQ ID NO: 2704 - RNA, 23 nt, synthetic construct
  source 1..23: mol_type = other RNA
ttttctttcatctgatgtgtcag

SEQ ID NO: 2705 - RNA, 23 nt, synthetic construct
  source 1..23: mol_type = other RNA
ttcatctgatgtgtcagtatctg

SEQ ID NO: 2706 - RNA, 23 nt, synthetic construct
  source 1..23: mol_type = other RNA
tgatgtgtcagtatctgttgatt

SEQ ID NO: 2707 - RNA, 23 nt, synthetic construct
  source 1..23: mol_type = other RNA
gtcagtatctgttgatttgcttt

SEQ ID NO: 2708 - RNA, 23 nt, synthetic construct
  source 1..23: mol_type = other RNA
ctgttgatttgctttgtagtttg

SEQ ID NO: 2709 - RNA, 23 nt, synthetic construct
  source 1..23: mol_type = other RNA
ttgctttgtagtttgttgacatc

SEQ ID NO: 2710 - RNA, 23 nt, synthetic construct
  source 1..23: mol_type = other RNA
ttgtagtttgttgacatcttaag

SEQ ID NO: 2711 - RNA, 23 nt, synthetic construct
  source 1..23: mol_type = other RNA
gtttgttgacatcttaagatttg

SEQ ID NO: 2712 - RNA, 23 nt, synthetic construct
  source 1..23: mol_type = other RNA
ttgacatcttaagatttgatgtg

SEQ ID NO: 2713 - RNA, 23 nt, synthetic construct
  source 1..23: mol_type = other RNA
tcttaagatttgatgtgaaagtt

SEQ ID NO: 2714 - RNA, 23 nt, synthetic construct
  source 1..23: mol_type = other RNA
gatttgatgtgaaagttttagat

SEQ ID NO: 2715 - RNA, 21 nt, synthetic construct
  source 1..21: mol_type = other RNA
ttctgtctctgtatgttgtta

SEQ ID NO: 2716 - RNA, 21 nt, synthetic construct
  source 1..21: mol_type = other RNA
tggtttcttgacattttaaga

SEQ ID NO: 2717 - RNA, 21 nt, synthetic construct
  source 1..21: mol_type = other RNA
aacttctactctaatctatga

SEQ ID NO: 2718 - RNA, 21 nt, synthetic construct
  source 1..21: mol_type = other RNA
tcagtctaatgtttcgctgta

SEQ ID NO: 2719 - RNA, 23 nt, synthetic construct
  source 1..23: mol_type = other RNA
taacaacatacagagacagaatg

SEQ ID NO: 2720 - RNA, 23 nt, synthetic construct
  source 1..23: mol_type = other RNA
tcttaaaatgtcaagaaaccatg

SEQ ID NO: 2721 - RNA, 23 nt, synthetic construct
  source 1..23: mol_type = other RNA
tcatagattagagtagaagttga

SEQ ID NO: 2722 - RNA, 23 nt, synthetic construct
  source 1..23: mol_type = other RNA
tacagcgaaacattagactgagc

SEQ ID NO: 2723 - RNA, 21 nt, synthetic construct
  source 1..21: mol_type = other RNA
  modified_base 1: mod_base = OTHER; note = 2'-O-methyluridine-3'-phosphorothioate
  modified_base 2: mod_base = OTHER; note = 2'-O-methyluridine-3'-phosphorothioate
  modified_base 3: mod_base = OTHER; note = 2'-O-methylcytidine-3'-phosphate
  modified_base 4: mod_base = OTHER; note = 2'-O-methyluridine-3'-phosphate
  modified_base 5: mod_base = OTHER; note = 2'-O-methylguanosine-3'-phosphate
  modified_base 6: mod_base = OTHER; note = 2'-O-hexadecyl-uridine-3'-phosphate
  modified_base 7: mod_base = OTHER; note = 2'-deoxy-2'-fluorocytidine-3'-phosphate
  modified_base 8: mod_base = OTHER; note = 2'-O-methyluridine-3'-phosphate
  modified_base 9: mod_base = OTHER; note = 2'-deoxy-2'-fluorocytidine-3'-phosphate
  modified_base 10: mod_base = OTHER; note = 2'-deoxy-2'-fluorouridine-3'-phosphate
  modified_base 11: mod_base = OTHER; note = 2'-deoxy-2'-fluoroguanosine-3'-phosphate
  modified_base 12: mod_base = OTHER; note = 2'-O-methyluridine-3'-phosphate
  modified_base 13: mod_base = OTHER; note = 2'-O-methyladenosine-3'-phosphate
  modified_base 14: mod_base = OTHER; note = 2'-O-methyluridine-3'-phosphate
  modified_base 15: mod_base = OTHER; note = 2'-O-methylguanosine-3'-phosphate
  modified_base 16: mod_base = OTHER; note = 2'-O-methyluridine-3'-phosphate
  modified_base 17: mod_base = OTHER; note = 2'-O-methyluridine-3'-phosphate
  modified_base 18: mod_base = OTHER; note = 2'-O-methylguanosine-3'-phosphate
  modified_base 19: mod_base = OTHER; note = 2'-O-methyluridine-3'-phosphorothioate
  modified_base 20: mod_base = OTHER; note = 2'-O-methyluridine-3'-phosphorothioate
  modified_base 21: mod_base = OTHER; note = 2'-O-methyladenosine
ttctgtctctgtatgttgtta

SEQ ID NO: 2724 - RNA, 21 nt, synthetic construct
  source 1..21: mol_type = other RNA
  modified_base 1: mod_base = OTHER; note = 2'-O-methyluridine-3'-phosphorothioate
  modified_base 2: mod_base = OTHER; note = 2'-O-methylguanosine-3'-phosphorothioate
  modified_base 3: mod_base = OTHER; note = 2'-O-methylguanosine-3'-phosphate
  modified_base 4: mod_base = OTHER; note = 2'-O-methyluridine-3'-phosphate
  modified_base 5: mod_base = OTHER; note = 2'-O-methyluridine-3'-phosphate
  modified_base 6: mod_base = OTHER; note = 2'-O-hexadecyl-uridine-3'-phosphate
  modified_base 7: mod_base = OTHER; note = 2'-deoxy-2'-fluorocytidine-3'-phosphate
  modified_base 8: mod_base = OTHER; note = 2'-O-methyluridine-3'-phosphate
  modified_base 9: mod_base = OTHER; note = 2'-deoxy-2'-fluorouridine-3'-phosphate
  modified_base 10: mod_base = OTHER; note = 2'-deoxy-2'-fluoroguanosine-3'-phosphate
  modified_base 11: mod_base = OTHER; note = 2'-deoxy-2'-fluoroadenosine-3'-phosphate
  modified_base 12: mod_base = OTHER; note = 2'-O-methylcytidine-3'-phosphate
  modified_base 13: mod_base = OTHER; note = 2'-O-methyladenosine-3'-phosphate
  modified_base 14: mod_base = OTHER; note = 2'-O-methyluridine-3'-phosphate
  modified_base 15: mod_base = OTHER; note = 2'-O-methyluridine-3'-phosphate
  modified_base 16: mod_base = OTHER; note = 2'-O-methyluridine-3'-phosphate
  modified_base 17: mod_base = OTHER; note = 2'-O-methyluridine-3'-phosphate
  modified_base 18: mod_base = OTHER; note = 2'-O-methyladenosine-3'-phosphate
  modified_base 19: mod_base = OTHER; note = 2'-O-methyladenosine-3'-phosphorothioate
  modified_base 20: mod_base = OTHER; note = 2'-O-methylguanosine-3'-phosphorothioate
  modified_base 21: mod_base = OTHER; note = 2'-O-methyladenosine
tggtttcttgacattttaaga

SEQ ID NO: 2725 - RNA, 21 nt, synthetic construct
  source 1..21: mol_type = other RNA
  modified_base 1: mod_base = OTHER; note = 2'-O-methyladenosine-3'-phosphorothioate
  modified_base 2: mod_base = OTHER; note = 2'-O-methyladenosine-3'-phosphorothioate
  modified_base 3: mod_base = OTHER; note = 2'-O-methylcytidine-3'-phosphate
  modified_base 4: mod_base = OTHER; note = 2'-O-methyluridine-3'-phosphate
  modified_base 5: mod_base = OTHER; note = 2'-O-methyluridine-3'-phosphate
  modified_base 6: mod_base = OTHER; note = 2'-O-hexadecyl-cytidine-3'-phosphate
  modified_base 7: mod_base = OTHER; note = 2'-deoxy-2'-fluorouridine-3'-phosphate
  modified_base 8: mod_base = OTHER; note = 2'-O-methyladenosine-3'-phosphate
  modified_base 9: mod_base = OTHER; note = 2'-deoxy-2'-fluorocytidine-3'-phosphate
  modified_base 10: mod_base = OTHER; note = 2'-deoxy-2'-fluorouridine-3'-phosphate
  modified_base 11: mod_base = OTHER; note = 2'-deoxy-2'-fluorocytidine-3'-phosphate
  modified_base 12: mod_base = OTHER; note = 2'-O-methyluridine-3'-phosphate
  modified_base 13: mod_base = OTHER; note = 2'-O-methyladenosine-3'-phosphate
  modified_base 14: mod_base = OTHER; note = 2'-O-methyladenosine-3'-phosphate
  modified_base 15: mod_base = OTHER; note = 2'-O-methyluridine-3'-phosphate
  modified_base 16: mod_base = OTHER; note = 2'-O-methylcytidine-3'-phosphate
  modified_base 17: mod_base = OTHER; note = 2'-O-methyluridine-3'-phosphate
  modified_base 18: mod_base = OTHER; note = 2'-O-methyladenosine-3'-phosphate
  modified_base 19: mod_base = OTHER; note = 2'-O-methyluridine-3'-phosphorothioate
  modified_base 20: mod_base = OTHER; note = 2'-O-methylguanosine-3'-phosphorothioate
  modified_base 21: mod_base = OTHER; note = 2'-O-methyladenosine
aacttctactctaatctatga

SEQ ID NO: 2726 - RNA, 21 nt, synthetic construct
  source 1..21: mol_type = other RNA
  modified_base 1: mod_base = OTHER; note = 2'-O-methyluridine-3'-phosphorothioate
  modified_base 2: mod_base = OTHER; note = 2'-O-methylcytidine-3'-phosphorothioate
  modified_base 3: mod_base = OTHER; note = 2'-O-methyladenosine-3'-phosphate
  modified_base 4: mod_base = OTHER; note = 2'-O-methylguanosine-3'-phosphate
  modified_base 5: mod_base = OTHER; note = 2'-O-methyluridine-3'-phosphate
  modified_base 6: mod_base = OTHER; note = 2'-O-hexadecyl-cytidine-3'-phosphate
  modified_base 7: mod_base = OTHER; note = 2'-deoxy-2'-fluorouridine-3'-phosphate
  modified_base 8: mod_base = OTHER; note = 2'-O-methyladenosine-3'-phosphate
  modified_base 9: mod_base = OTHER; note = 2'-deoxy-2'-fluoroadenosine-3'-phosphate
  modified_base 10: mod_base = OTHER; note = 2'-deoxy-2'-fluorouridine-3'-phosphate
  modified_base 11: mod_base = OTHER; note = 2'-deoxy-2'-fluoroguanosine-3'-phosphate
  modified_base 12: mod_base = OTHER; note = 2'-O-methyluridine-3'-phosphate
  modified_base 13: mod_base = OTHER; note = 2'-O-methyluridine-3'-phosphate
  modified_base 14: mod_base = OTHER; note = 2'-O-methyluridine-3'-phosphate
  modified_base 15: mod_base = OTHER; note = 2'-O-methylcytidine-3'-phosphate
  modified_base 16: mod_base = OTHER; note = 2'-O-methylguanosine-3'-phosphate
  modified_base 17: mod_base = OTHER; note = 2'-O-methylcytidine-3'-phosphate
  modified_base 18: mod_base = OTHER; note = 2'-O-methyluridine-3'-phosphate
  modified_base 19: mod_base = OTHER; note = 2'-O-methylguanosine-3'-phosphorothioate
  modified_base 20: mod_base = OTHER; note = 2'-O-methyluridine-3'-phosphorothioate
  modified_base 21: mod_base = OTHER; note = 2'-O-methyladenosine
tcagtctaatgtttcgctgta

SEQ ID NO: 2727 - RNA, 23 nt, synthetic construct
  source 1..23: mol_type = other RNA
  modified_base 1: mod_base = OTHER; note = 2'-O-methyluridine-3'-phosphorothioate 5'-(E)-Vinylphosphonate
  modified_base 2: mod_base = OTHER; note = 2'-deoxy-2'-fluoroadenosine-3'-phosphorothioate
  modified_base 3: mod_base = OTHER; note = 2'-O-methyladenosine-3'-phosphate
  modified_base 4: mod_base = OTHER; note = 2'-O-methylcytidine-3'-phosphate
  modified_base 5: mod_base = OTHER; note = 2'-O-methyladenosine-3'-phosphate
  modified_base 6: mod_base = OTHER; note = 2'-deoxy-2'-fluoroadenosine-3'-phosphate
  modified_base 7: mod_base = OTHER; note = 2'-O-methylcytidine-3'-phosphate
  modified_base 8: mod_base = OTHER; note = 2'-deoxy-2'-fluoroadenosine-3'-phosphate
  modified_base 9: mod_base = OTHER; note = 2'-deoxy-2'-fluorouridine-3'-phosphate
  modified_base 10: mod_base = OTHER; note = 2'-O-methyladenosine-3'-phosphate
  modified_base 11: mod_base = OTHER; note = 2'-O-methylcytidine-3'-phosphate
  modified_base 12: mod_base = OTHER; note = 2'-O-methyladenosine-3'-phosphate
  modified_base 13: mod_base = OTHER; note = 2'-O-methylguanosine-3'-phosphate
  modified_base 14: mod_base = OTHER; note = 2'-deoxy-2'-fluoroadenosine-3'-phosphate
  modified_base 15: mod_base = OTHER; note = 2'-O-methylguanosine-3'-phosphate
  modified_base 16: mod_base = OTHER; note = 2'-deoxy-2'-fluoroadenosine-3'-phosphate
  modified_base 17: mod_base = OTHER; note = 2'-O-methylcytidine-3'-phosphate
  modified_base 18: mod_base = OTHER; note = 2'-O-methyladenosine-3'-phosphate
  modified_base 19: mod_base = OTHER; note = 2'-O-methylguanosine-3'-phosphate
  modified_base 20: mod_base = OTHER; note = 2'-O-methyladenosine-3'-phosphate
  modified_base 21: mod_base = OTHER; note = 2'-O-methyladenosine-3'-phosphorothioate
  modified_base 22: mod_base = OTHER; note = 2'-O-methyluridine-3'-phosphorothioate
  modified_base 23: mod_base = OTHER; note = 2'-O-methylguanosine
taacaacatacagagacagaatg

SEQ ID NO: 2728 - RNA, 23 nt, synthetic construct
  source 1..23: mol_type = other RNA
  modified_base 1: mod_base = OTHER; note = 2'-O-methyluridine-3'-phosphorothioate 5'-(E)-Vinylphosphonate
  modified_base 2: mod_base = OTHER; note = 2'-deoxy-2'-fluorocytidine-3'-phosphorothioate
  modified_base 3: mod_base = OTHER; note = 2'-O-methyluridine-3'-phosphate
  modified_base 4: mod_base = OTHER; note = 2'-O-methyluridine-3'-phosphate
  modified_base 5: mod_base = OTHER; note = 2'-O-methyladenosine-3'-phosphate
  modified_base 6: mod_base = OTHER; note = 2'-deoxy-2'-fluoroadenosine-3'-phosphate
  modified_base 7: mod_base = OTHER; note = 2'-O-methyladenosine-3'-phosphate
  modified_base 8: mod_base = OTHER; note = 2'-deoxy-2'-fluoroadenosine-3'-phosphate
  modified_base 9: mod_base = OTHER; note = 2'-deoxy-2'-fluorouridine-3'-phosphate
  modified_base 10: mod_base = OTHER; note = 2'-O-methylguanosine-3'-phosphate
  modified_base 11: mod_base = OTHER; note = 2'-O-methyluridine-3'-phosphate
  modified_base 12: mod_base = OTHER; note = 2'-O-methylcytidine-3'-phosphate
  modified_base 13: mod_base = OTHER; note = 2'-O-methyladenosine-3'-phosphate
  modified_base 14: mod_base = OTHER; note = 2'-deoxy-2'-fluoroadenosine-3'-phosphate
  modified_base 15: mod_base = OTHER; note = 2'-O-methylguanosine-3'-phosphate
  modified_base 16: mod_base = OTHER; note = 2'-deoxy-2'-fluoroadenosine-3'-phosphate
  modified_base 17: mod_base = OTHER; note = 2'-O-methyladenosine-3'-phosphate
  modified_base 18: mod_base = OTHER; note = 2'-O-methyladenosine-3'-phosphate
  modified_base 19: mod_base = OTHER; note = 2'-O-methylcytidine-3'-phosphate
  modified_base 20: mod_base = OTHER; note = 2'-O-methylcytidine-3'-phosphate
  modified_base 21: mod_base = OTHER; note = 2'-O-methyladenosine-3'-phosphorothioate
  modified_base 22: mod_base = OTHER; note = 2'-O-methyluridine-3'-phosphorothioate
  modified_base 23: mod_base = OTHER; note = 2'-O-methylguanosine
tcttaaaatgtcaagaaaccatg

SEQ ID NO: 2729 - RNA, 23 nt, synthetic construct
  source 1..23: mol_type = other RNA
  modified_base 1: mod_base = OTHER; note = 2'-O-methyluridine-3'-phosphorothioate 5'-(E)-Vinylphosphonate
  modified_base 2: mod_base = OTHER; note = 2'-deoxy-2'-fluorocytidine-3'-phosphorothioate
  modified_base 3: mod_base = OTHER; note = 2'-O-methyladenosine-3'-phosphate
  modified_base 4: mod_base = OTHER; note = 2'-O-methyluridine-3'-phosphate
  modified_base 5: mod_base = OTHER; note = 2'-O-methyladenosine-3'-phosphate
  modified_base 6: mod_base = OTHER; note = 2'-deoxy-2'-fluoroguanosine-3'-phosphate
  modified_base 7: mod_base = OTHER; note = 2'-O-methyladenosine-3'-phosphate
  modified_base 8: mod_base = OTHER; note = 2'-deoxy-2'-fluorouridine-3'-phosphate
  modified_base 9: mod_base = OTHER; note = 2'-deoxy-2'-fluorouridine-3'-phosphate
  modified_base 10: mod_base = OTHER; note = 2'-O-methyladenosine-3'-phosphate
  modified_base 11: mod_base = OTHER; note = 2'-O-methylguanosine-3'-phosphate
  modified_base 12: mod_base = OTHER; note = 2'-O-methyladenosine-3'-phosphate
  modified_base 13: mod_base = OTHER; note = 2'-O-methylguanosine-3'-phosphate
  modified_base 14: mod_base = OTHER; note = 2'-deoxy-2'-fluorouridine-3'-phosphate
  modified_base 15: mod_base = OTHER; note = 2'-O-methyladenosine-3'-phosphate
  modified_base 16: mod_base = OTHER; note = 2'-deoxy-2'-fluoroguanosine-3'-phosphate
  modified_base 17: mod_base = OTHER; note = 2'-O-methyladenosine-3'-phosphate
  modified_base 18: mod_base = OTHER; note = 2'-O-methyladenosine-3'-phosphate
  modified_base 19: mod_base = OTHER; note = 2'-O-methylguanosine-3'-phosphate
  modified_base 20: mod_base = OTHER; note = 2'-O-methyluridine-3'-phosphate
  modified_base 21: mod_base = OTHER; note = 2'-O-methyluridine-3'-phosphorothioate
  modified_base 22: mod_base = OTHER; note = 2'-O-methylguanosine-3'-phosphorothioate
  modified_base 23: mod_base = OTHER; note = 2'-O-methyladenosine
tcatagattagagtagaagttga

SEQ ID NO: 2730 - RNA, 23 nt, synthetic construct
  source 1..23: mol_type = other RNA
  modified_base 1: mod_base = OTHER; note = 2'-O-methyluridine-3'-phosphorothioate 5'-(E)-Vinylphosphonate
  modified_base 2: mod_base = OTHER; note = 2'-deoxy-2'-fluoroadenosine-3'-phosphorothioate
  modified_base 3: mod_base = OTHER; note = 2'-O-methylcytidine-3'-phosphate
  modified_base 4: mod_base = OTHER; note = 2'-O-methyladenosine-3'-phosphate
  modified_base 5: mod_base = OTHER; note = 2'-O-methylguanosine-3'-phosphate
  modified_base 6: mod_base = OTHER; note = 2'-deoxy-2'-fluorocytidine-3'-phosphate
  modified_base 7: mod_base = OTHER; note = 2'-O-methylguanosine-3'-phosphate
  modified_base 8: mod_base = OTHER; note = 2'-deoxy-2'-fluoroadenosine-3'-phosphate
  modified_base 9: mod_base = OTHER; note = 2'-deoxy-2'-fluoroadenosine-3'-phosphate
  modified_base 10: mod_base = OTHER; note = 2'-O-methyladenosine-3'-phosphate
  modified_base 11: mod_base = OTHER; note = 2'-O-methylcytidine-3'-phosphate
  modified_base 12: mod_base = OTHER; note = 2'-O-methyladenosine-3'-phosphate
  modified_base 13: mod_base = OTHER; note = 2'-O-methyluridine-3'-phosphate
  modified_base 14: mod_base = OTHER; note = 2'-deoxy-2'-fluorouridine-3'-phosphate
  modified_base 15: mod_base = OTHER; note = 2'-O-methyladenosine-3'-phosphate
  modified_base 16: mod_base = OTHER; note = 2'-deoxy-2'-fluoroguanosine-3'-phosphate
  modified_base 17: mod_base = OTHER; note = 2'-O-methyladenosine-3'-phosphate
  modified_base 18: mod_base = OTHER; note = 2'-O-methylcytidine-3'-phosphate
  modified_base 19: mod_base = OTHER; note = 2'-O-methyluridine-3'-phosphate
  modified_base 20: mod_base = OTHER; note = 2'-O-methylguanosine-3'-phosphate
  modified_base 21: mod_base = OTHER; note = 2'-O-methyladenosine-3'-phosphorothioate
  modified_base 22: mod_base = OTHER; note = 2'-O-methylguanosine-3'-phosphorothioate
  modified_base 23: mod_base = OTHER; note = 2'-O-methylcytidine
tacagcgaaacattagactgagc

SEQ ID NO: 2731 - RNA, 23 nt, synthetic construct
  source 1..23: mol_type = other RNA
cattctgtctctgtatgttgttg

SEQ ID NO: 2732 - RNA, 23 nt, synthetic construct
  source 1..23: mol_type = other RNA
catggtttcttgacattttaaga

SEQ ID NO: 2733 - RNA, 23 nt, synthetic construct
  source 1..23: mol_type = other RNA
tcaacttctactctaatctatgt

SEQ ID NO: 2734 - RNA, 23 nt, synthetic construct
  source 1..23: mol_type = other RNA
gctcagtctaatgtttcgctgtg

SEQ ID NO: 2735 - RNA, 21 nt, synthetic construct
  source 1..21: mol_type = other RNA
gggagtcaaagttctgtttga

SEQ ID NO: 2736 - RNA, 23 nt, synthetic construct
  source 1..23: mol_type = other RNA
tcaaacagaactttgactcccat

SEQ ID NO: 2737 - RNA, 21 nt, synthetic construct
  source 1..21: mol_type = other RNA
  modified_base 1: mod_base = OTHER; note = 2'-O-methylguanosine-3'-phosphorothioate
  modified_base 2: mod_base = OTHER; note = 2'-O-methylguanosine-3'-phosphorothioate
  modified_base 3: mod_base = OTHER; note = 2'-O-methylguanosine-3'-phosphate
  modified_base 4: mod_base = OTHER; note = 2'-O-methyladenosine-3'-phosphate
  modified_base 5: mod_base = OTHER; note = 2'-O-methylguanosine-3'-phosphate
  modified_base 6: mod_base = OTHER; note = 2'-O-hexadecyl-uridine-3'-phosphate
  modified_base 7: mod_base = OTHER; note = 2'-deoxy-2'-fluorocytidine-3'-phosphate
  modified_base 8: mod_base = OTHER; note = 2'-O-methyladenosine-3'-phosphate
  modified_base 9: mod_base = OTHER; note = 2'-deoxy-2'-fluoroadenosine-3'-phosphate
  modified_base 10: mod_base = OTHER; note = 2'-deoxy-2'-fluoroadenosine-3'-phosphate
  modified_base 11: mod_base = OTHER; note = 2'-deoxy-2'-fluoroguanosine-3'-phosphate
  modified_base 12: mod_base = OTHER; note = 2'-O-methyluridine-3'-phosphate
  modified_base 13: mod_base = OTHER; note = 2'-O-methyluridine-3'-phosphate
  modified_base 14: mod_base = OTHER; note = 2'-O-methylcytidine-3'-phosphate
  modified_base 15: mod_base = OTHER; note = 2'-O-methyluridine-3'-phosphate
  modified_base 16: mod_base = OTHER; note = 2'-O-methylguanosine-3'-phosphate
  modified_base 17: mod_base = OTHER; note = 2'-O-methyluridine-3'-phosphate
  modified_base 18: mod_base = OTHER; note = 2'-O-methyluridine-3'-phosphate
  modified_base 19: mod_base = OTHER; note = 2'-O-methyluridine-3'-phosphorothioate
  modified_base 20: mod_base = OTHER; note = 2'-O-methylguanosine-3'-phosphorothioate
  modified_base 21: mod_base = OTHER; note = 2'-O-methyladenosine
gggagtcaaagttctgtttga

SEQ ID NO: 2738 - RNA, 23 nt, synthetic construct
  source 1..23: mol_type = other RNA
  modified_base 1: mod_base = OTHER; note = 2'-O-methyluridine-3'-phosphorothioate 5'-(E)-Vinylphosphonate
  modified_base 2: mod_base = OTHER; note = 2'-deoxy-2'-fluorocytidine-3'-phosphorothioate
  modified_base 3: mod_base = OTHER; note = 2'-O-methyladenosine-3'-phosphate
  modified_base 4: mod_base = OTHER; note = 2'-O-methyladenosine-3'-phosphate
  modified_base 5: mod_base = OTHER; note = 2'-O-methyladenosine-3'-phosphate
  modified_base 6: mod_base = OTHER; note = 2'-deoxy-2'-fluorocytidine-3'-phosphate
  modified_base 7: mod_base = OTHER; note = 2'-O-methyladenosine-3'-phosphate
  modified_base 8: mod_base = OTHER; note = 2'-deoxy-2'-fluoroguanosine-3'-phosphate
  modified_base 9: mod_base = OTHER; note = 2'-deoxy-2'-fluoroadenosine-3'-phosphate
  modified_base 10: mod_base = OTHER; note = 2'-O-methyladenosine-3'-phosphate
  modified_base 11: mod_base = OTHER; note = 2'-O-methylcytidine-3'-phosphate
  modified_base 12: mod_base = OTHER; note = 2'-O-methyluridine-3'-phosphate
  modified_base 13: mod_base = OTHER; note = 2'-O-methyluridine-3'-phosphate
  modified_base 14: mod_base = OTHER; note = 2'-deoxy-2'-fluorouridine-3'-phosphate
  modified_base 15: mod_base = OTHER; note = 2'-O-methylguanosine-3'-phosphate
  modified_base 16: mod_base = OTHER; note = 2'-deoxy-2'-fluoroadenosine-3'-phosphate
  modified_base 17: mod_base = OTHER; note = 2'-O-methylcytidine-3'-phosphate
  modified_base 18: mod_base = OTHER; note = 2'-O-methyluridine-3'-phosphate
  modified_base 19: mod_base = OTHER; note = 2'-O-methylcytidine-3'-phosphate
  modified_base 20: mod_base = OTHER; note = 2'-O-methylcytidine-3'-phosphate
  modified_base 21: mod_base = OTHER; note = 2'-O-methylcytidine-3'-phosphorothioate
  modified_base 22: mod_base = OTHER; note = 2'-O-methyladenosine-3'-phosphorothioate
  modified_base 23: mod_base = OTHER; note = 2'-O-methyluridine
tcaaacagaactttgactcccat

1. A double stranded ribonucleic acid (dsRNA) agent for inhibiting expression of G Protein-Coupled Receptor 75 (GPR75) in a cell,
(a) wherein the dsRNA agent comprises a sense strand and an antisense strand forming a double stranded region,
wherein the sense strand comprises a nucleotide sequence comprising at least 15 contiguous nucleotides, with 0, 1, 2, or 3 mismatches, of a portion of the nucleotide sequence of any one of SEQ ID NOs:1-4, or a nucleotide sequence having at least 90% nucleotide sequence identity to a portion of the nucleotide sequence of any one of SEQ ID NOs:1-4, and the antisense strand comprises a nucleotide sequence comprising at least 15 contiguous nucleotides, with 0, 1, 2, or 3 mismatches, of the corresponding portion of the nucleotide sequence of any one of SEQ ID NOs:5-8, or a nucleotide sequence having at least 90% nucleotide sequence identity to a portion of the nucleotide sequence of an one of SEQ ID NOs:5-8; and wherein the sense strand or the antisense strand is conjugated to one or more lipophilic moieties; or
(b) wherein the dsRNA agent comprises a sense strand and an antisense strand forming a double stranded region,
wherein the antisense strand comprises a region complementary to part of an mRNA encoding a GPR75 gene (any one of SEQ ID NOs:1-4),
wherein each strand independently is 14 to 30 nucleotides in length; and
wherein the sense strand or the antisense strand is conjugated to one or more lipophilic moieties; or
(c) wherein the dsRNA agent comprises a sense strand and an antisense strand forming a double stranded region,
wherein the antisense strand comprises at least 15 contiguous nucleotides differing by no more than 3 nucleotides from any one of the antisense nucleotide sequences in any one of Tables 2, 3, 5, and 6,
wherein each strand independently is 14 to 30 nucleotides in length; and wherein the sense strand or the antisense strand is conjugated to one or more lipophilic moieties; or
(d) wherein the dsRNA agent comprises a sense strand and an antisense strand forming a double stranded region,
wherein the sense strand comprises at least 15 contiguous nucleotides differing by no more than 3 nucleotides from any one of the nucleotide sequences of nucleotides 38-60; 50-72; 148-181; 153-181; 153-175; 159-181; 228-250; 240-262; 341-363; 341-368; 346-368; 369-396; 369-391; 374-396; 388-410; 414-436; 424-461; 424-446; 424-451; 434-456; 439-461; 429-451; 457-504; 462-504; 462-491; 482-504; 469-491; 457-479; 462-584; 475-497; 469-491; 509-537; 509-531; 515-537; 544-576; 544-566; 549-571; 580-607; 580-602; 585-607; 595-617; 615-647; 615-637; 620-642; 620-647; 625-647; 773-806; 773-795; 773-795; 778-800; 784-806; 837-872; 837-859; 843-872; 843-865; 850-872; 860-882; 889-911; 900-936; 900-922; 908-936; 908-930; 914-936; 938-990; 938-960; 943-965; 968-990; 1060-1101; 1060-1082; 1066-1088; 1073-1095; 1079-1101; 1097-1119; 1238-1260; 1268-1290; 1284-1393; 1284-1306; 1292-1393; 1292-1314; 1292-1383; 1292-1314; 1301-1323; 1307-1383; 1307-1342; 1307-1329; 1313-1335; 1371-1393; 1351-1373; 1320-1342; 1336-1358; 1345-1367; 1351-1373; 1361-1383; 1366-1388; 1393-1415; 1422-1463; 1422-1444; 1441-1463; 1487-1526; 1487-1509; 1493-1526; 1493-1515; 1498-1520; 1504-1526; 1515-1571; 1515-1557; 1515-1543; 1515-1537; 1521-1543; 1530-1552; 1535-1557; 1540-1562; 1549-1571; 1559-1586; 1559-1581; 1564-1586; 1583-1629; 1583-1605; 1588-1610; 1595-1617; 1600-1629; 1600-1622; 1607-1629; 1624-1646; 1635-1657; 1672-1721; 1672-1710; 1677-1699; 1699-1721; 1672-1699; 1688-1710; 1672-1694; 1683-1705; 1693-1714; 1732-1754; 1744-1798; 1751-1773; 1758-1780; 1767-1789; 1776-1798; 1790-1818; 1790-1812; 1796-1818; 1808-1856; 1808-1848; 1808-1836; 1808-1830; 1826-1848; 1814-1836; 1819-1841; 1834-1856; 1877-2082; 1877-1899; 1882-2082; 1882-1925; 1882-1963; 1882-1904; 1887-1693; 1887-1909; 1898-1920; 1903-1925; 1908-1930; 1913-1935; 1913-1950; 1921-1950; 1921-1943; 1928-1950; 1933-1955; 1941-1963; 1946-1968; 1953-1985; 1953-2082; 1953-1975; 1938-1985; 1958-1980; 1963-1985; 1968-1990; 1974-1996; 1974-2065; 1974-2082; 1974-2002; 1980-2002; 1985-2007; 1990-2012; 1990-2033; 1999-2021; 2005-2033; 2005-2027; 2011-2033; 2017-2039; 2025-2055; 2025-2047; 2033-2055; 2038-2060; 2043-2065; 2033-2055; 2048-2070; 2054-2082; 2054-2076; and 2060-2082 of SEQ ID NO; 1,
wherein the antisense strand comprises at least 15 contiguous nucleotides from the corresponding nucleotide sequence of SEQ ID NO: 2; and
wherein the sense strand or the antisense strand is conjugated to one or more lipophilic moieties.

2-11. (canceled)

12. The dsRNA agent of claim 1, wherein the dsRNA agent comprises at least one modified nucleotide.

13. (canceled)

14. (canceled)

15. The dsRNA agent of claim 12, wherein at least one of the modified nucleotides is selected from the group a deoxy-nucleotide, a 3′-terminal deoxythimidine (dT) nucleotide, a 2′-O-methyl modified nucleotide, a 2′-fluoro modified nucleotide, a 2′-deoxy-modified nucleotide, a locked nucleotide, an unlocked nucleotide, a conformationally restricted nucleotide, a constrained ethyl nucleotide, an abasic nucleotide, a 2′-amino-modified nucleotide, a 2′-O-allyl-modified nucleotide, 2′-C-alkyl-modified nucleotide, a 2′-methoxyethyl modified nucleotide, a 2′-O-alkyl-modified nucleotide, a morpholino nucleotide, a phosphoramidate, a non-natural base comprising nucleotide, a tetrahydropyran modified nucleotide, a 1,5-anhydrohexitol modified nucleotide, a cyclohexenyl modified nucleotide, a nucleotide comprising a 5′-phosphorothioate group, a nucleotide comprising a 5′-methylphosphonate group, a nucleotide comprising a 5′ phosphate or 5′ phosphate mimic, a nucleotide comprising vinyl phosphonate, a nucleotide comprising adenosine-glycol nucleic acid (GNA), a nucleotide comprising thymidine-glycol nucleic acid (GNA)S-Isomer, a nucleotide comprising 2-hydroxymethyl-tetrahydrofurane-5-phosphate, a nucleotide comprising 2′-deoxythymidine-3′-phosphate, a nucleotide comprising 2′-deoxyguanosine-3′-phosphate, a 2′-0 hexadecyl nucleotide, a nucleotide comprising a 2′-phosphate, a cytidine-2′-phosphate nucleotide, a guanosine-2′-phosphate nucleotide, a 2′-O-hexadecyl-cytidine-3′-phosphate nucleotide, a 2′-O-hexadecyl-adenosine-3′-phosphate nucleotide, a 2′-O-hexadecyl-guanosine-3′-phosphate nucleotide, a 2′-O-hexadecyl-uridine-3′-phosphate nucleotide, a 5′-vinyl phosphonate (VP), a 2′-deoxyadenosine-3′-phosphate nucleotide, a 2′-deoxycytidine-3′-phosphate nucleotide, a 2′-deoxyguanosine-3′-phosphate nucleotide, a 2′-deoxythymidine-3′-phosphate nucleotide, a 2′-deoxyuridine nucleotide,
and a terminal nucleotide linked to a cholesteryl derivative and a dodecanoic acid bisdecylamide group; and combinations thereof.

16-18. (canceled)

19. The dsRNA agent of claim 15, further comprising at least one phosphorothioate internucleotide linkage.

20. (canceled)

21. The dsRNA agent of claim 1, wherein each strand is no more than 30 nucleotides in length.

22-32. (canceled)

33. The dsRNA agent of claim 1, wherein one or more lipophilic moieties are conjugated to one or more internal positions on at least one strand.

34-42. (canceled)

43. The dsRNA agent of claim 1, wherein the one or more lipophilic moieties are conjugated to one or more of the internal positions selected from the group consisting of positions 4-8 and 13-18 on the sense strand, and positions 6-10 and 15-18 on the antisense strand, counting from the 5′-end of each strand.

44-52. (canceled)

53. The dsRNA agent of claim 1, wherein the lipophilic moiety contains a saturated or unsaturated C4-C30 hydrocarbon chain, and an optional functional group selected from the group consisting of hydroxyl, amine, carboxylic acid, sulfonate, phosphate, thiol, azide, and alkyne.

54-56. (canceled)

57. The dsRNA agent of claim 1, wherein the lipophilic moiety is conjugated via a carrier that replaces one or more nucleotide(s) in the internal position(s) or the double stranded region.

58. (canceled)

59. (canceled)

60. The dsRNA agent of claim 1, wherein the lipophilic moiety is conjugated to a nucleobase, sugar moiety, or internucleosidic linkage.

61-69. (canceled)

70. The dsRNA agent of claim 1, further comprising a phosphate or phosphate mimic at the 5′-end of the antisense strand.

71-73. (canceled)

74. An isolated cell containing the dsRNA agent of claim 1.

75. A pharmaceutical composition for inhibiting expression of a GPR75 gene, comprising the dsRNA agent of claim 1.

76. (canceled)

77. A device for oral inhalative administration comprising the dsRNA agent of claim 1.

78. (canceled)

79. An in vitro method of inhibiting expression of a GPR75 gene in a cell, the method comprising:
(a) contacting the cell with the dsRNA agent of claim 1; and
(b) maintaining the cell produced in step (a) for a time sufficient to obtain degradation of the GPR75 gene, thereby inhibiting expression of the GPR75 gene in the cell.

80-82. (canceled)

83. A method of treating a subject having a G Protein-Coupled Receptor 75-(GPR75-) associated disease or a subject at risk of developing a GPR75-associated disease, comprising administering to the subject a therapeutically effective amount of the dsRNA agent of claim 1, thereby treating said subject.

84. The method of claim 83, wherein the subject is a human.

85. The method of claim 84, wherein the GPR75-associated disease is a body weight disorder.

86-88. (canceled)

89. The method of claim 83, wherein the dsRNA agent is administered to the subject at a dose of about 0.01 mg/kg to about 50 mg/kg.

90. The method of claim 83, wherein the dsRNA agent is administered to the subject intrathecally.

91. (canceled)

92. The method of claim 83, further comprising administering to the subject an additional agent or a therapy suitable for treatment or prevention of a GRP75-associated disorder.

93. (canceled)
